United States Patent Application Publication US 2019/0201553 A1 - sequence listing, part 3

SEQ ID NO: 65969 - DNA, 22 bp, Artificial Sequence
  chemically synthesized
gcgtgtaacttcctgtgaagca

SEQ ID NO: 65970 - DNA, 22 bp, Artificial Sequence
  chemically synthesized
cgtgtaacttcctgtgaagcag

SEQ ID NO: 65971 - DNA, 22 bp, Artificial Sequence
  chemically synthesized
cctgtgaagcagccgtggtgac

SEQ ID NO: 65972 - DNA, 22 bp, Artificial Sequence
  chemically synthesized
ctgtgaagcagccgtggtgact

SEQ ID NO: 65973 - DNA, 22 bp, Artificial Sequence
  chemically synthesized
tgaagcagccgtggtgactgca

SEQ ID NO: 65974 - DNA, 22 bp, Artificial Sequence
  chemically synthesized
cattttctgacactgtcagagt

SEQ ID NO: 65975 - DNA, 22 bp, Artificial Sequence
  chemically synthesized
tctgacactgtcagagtctgga

SEQ ID NO: 65976 - DNA, 22 bp, Artificial Sequence
  chemically synthesized
ctgacactgtcagagtctggac

SEQ ID NO: 65977 - DNA, 22 bp, Artificial Sequence
  chemically synthesized
tgacactgtcagagtctggaca

SEQ ID NO: 65978 - DNA, 22 bp, Artificial Sequence
  chemically synthesized
acactgtcagagtctggacaac

SEQ ID NO: 65979 - DNA, 22 bp, Artificial Sequence
  chemically synthesized
tcagagtctggacaaccctgcc

SEQ ID NO: 65980 - DNA, 22 bp, Artificial Sequence
  chemically synthesized
gacaaccctgccagctcctaga

SEQ ID NO: 65981 - DNA, 22 bp, Artificial Sequence
  chemically synthesized
ccagctcctagaagggcaaccc

SEQ ID NO: 65982 - DNA, 22 bp, Artificial Sequence
  chemically synthesized
ctagaagggcaacccaacaact

SEQ ID NO: 65983 - DNA, 22 bp, Artificial Sequence
  chemically synthesized
gaagggcaacccaacaactgtc

SEQ ID NO: 65984 - DNA, 22 bp, Artificial Sequence
  chemically synthesized
tcacagacgaagcatcaaaagc

SEQ ID NO: 65985 - DNA, 22 bp, Artificial Sequence
  chemically synthesized
tcgatagtgacctgcatttgca

SEQ ID NO: 65986 - DNA, 22 bp, Artificial Sequence
  chemically synthesized
catttgcagaaaatctgagggc

SEQ ID NO: 65987 - DNA, 22 bp, Artificial Sequence
  chemically synthesized
gcagaaaatctgagggctttct

SEQ ID NO: 65988 - DNA, 22 bp, Artificial Sequence
  chemically synthesized
cagaaaatctgagggctttcta

SEQ ID NO: 65989 - DNA, 22 bp, Artificial Sequence
  chemically synthesized
agggctttctaattaacagagg

SEQ ID NO: 65990 - DNA, 22 bp, Artificial Sequence
  chemically synthesized
tctaattaacagaggagctcta

SEQ ID NO: 65991 - DNA, 22 bp, Artificial Sequence
  chemically synthesized
ctaattaacagaggagctctaa

SEQ ID NO: 65992 - DNA, 22 bp, Artificial Sequence
  chemically synthesized
taattaacagaggagctctaaa

SEQ ID NO: 65993 - DNA, 22 bp, Artificial Sequence
  chemically synthesized
attaacagaggagctctaaatt

SEQ ID NO: 65994 - DNA, 22 bp, Artificial Sequence
  chemically synthesized
acagaggagctctaaattagag

SEQ ID NO: 65995 - DNA, 22 bp, Artificial Sequence
  chemically synthesized
taaattagagtaaagctgttcg

SEQ ID NO: 65996 - DNA, 22 bp, Artificial Sequence
  chemically synthesized
aattagagtaaagctgttcgac

SEQ ID NO: 65997 - DNA, 22 bp, Artificial Sequence
  chemically synthesized
gagtaaagctgttcgacaagac

SEQ ID NO: 65998 - DNA, 22 bp, Artificial Sequence
  chemically synthesized
ttcgacaagacccctcatacgc

SEQ ID NO: 65999 - DNA, 22 bp, Artificial Sequence
  chemically synthesized
gacaagacccctcatacgcggt

SEQ ID NO: 66000 - DNA, 22 bp, Artificial Sequence
  chemically synthesized
atacgcggtaagtgtcacaatg

SEQ ID NO: 66001 - DNA, 22 bp, Artificial Sequence
  chemically synthesized
catctaacaagcttctgatttt

SEQ ID NO: 66002 - DNA, 22 bp, Artificial Sequence
  chemically synthesized
acaagcttctgatttttaacag

SEQ ID NO: 66003 - DNA, 22 bp, Artificial Sequence
  chemically synthesized
ctgatttttaacagaagctatg

SEQ ID NO: 66004 - DNA, 22 bp, Artificial Sequence
  chemically synthesized
tgatttttaacagaagctatga

SEQ ID NO: 66005 - DNA, 22 bp, Artificial Sequence
  chemically synthesized
atttttaacagaagctatgaga

SEQ ID NO: 66006 - DNA, 22 bp, Artificial Sequence
  chemically synthesized
ttaacagaagctatgagaccaa

SEQ ID NO: 66007 - DNA, 22 bp, Artificial Sequence
  chemically synthesized
taacagaagctatgagaccaac

SEQ ID NO: 66008 - DNA, 22 bp, Artificial Sequence
  chemically synthesized
aacagaagctatgagaccaact

SEQ ID NO: 66009 - DNA, 22 bp, Artificial Sequence
  chemically synthesized
acagaagctatgagaccaactc

SEQ ID NO: 66010 - DNA, 22 bp, Artificial Sequence
  chemically synthesized
tgagaccaactcatttataatg

SEQ ID NO: 66011 - DNA, 22 bp, Artificial Sequence
  chemically synthesized
atttataatggttcagtttcaa

SEQ ID NO: 66012 - DNA, 22 bp, Artificial Sequence
  chemically synthesized
ataatggttcagtttcaaaggg

SEQ ID NO: 66013 - DNA, 22 bp, Artificial Sequence
  chemically synthesized
taatggttcagtttcaaagggg

SEQ ID NO: 66014 - DNA, 22 bp, Artificial Sequence
  chemically synthesized
agtttcaaagggggaaaaaaaa

SEQ ID NO: 66015 - DNA, 22 bp, Artificial Sequence
  chemically synthesized
caaagggggaaaaaaaagcaac

SEQ ID NO: 66016 - DNA, 22 bp, Artificial Sequence
  chemically synthesized
aaagggggaaaaaaaagcaacc

SEQ ID NO: 66017 - DNA, 22 bp, Artificial Sequence
  chemically synthesized
cttctagtgctttgggcgagtg

SEQ ID NO: 66018 - DNA, 22 bp, Artificial Sequence
  chemically synthesized
ctagtgctttgggcgagtgctt

SEQ ID NO: 66019 - DNA, 22 bp, Artificial Sequence
  chemically synthesized
tagtgctttgggcgagtgctta

SEQ ID NO: 66020 - DNA, 22 bp, Artificial Sequence
  chemically synthesized
gtgctttgggcgagtgcttaga

SEQ ID NO: 66021 - DNA, 22 bp, Artificial Sequence
  chemically synthesized
tgggcgagtgcttagacccagt

SEQ ID NO: 66022 - DNA, 22 bp, Artificial Sequence
  chemically synthesized
gggcgagtgcttagacccagtc

SEQ ID NO: 66023 - DNA, 22 bp, Artificial Sequence
  chemically synthesized
ggcgagtgcttagacccagtcc

SEQ ID NO: 66024 - DNA, 22 bp, Artificial Sequence
  chemically synthesized
agacccagtccccaaattcttc

SEQ ID NO: 66025 - DNA, 22 bp, Artificial Sequence
  chemically synthesized
gacccagtccccaaattcttcc

SEQ ID NO: 66026 - DNA, 22 bp, Artificial Sequence
  chemically synthesized
ttcctttgttgtctgctgaagc

SEQ ID NO: 66027 - DNA, 22 bp, Artificial Sequence
  chemically synthesized
cctttgttgtctgctgaagcat

SEQ ID NO: 66028 - DNA, 22 bp, Artificial Sequence
  chemically synthesized
ctttgttgtctgctgaagcatc

SEQ ID NO: 66029 - DNA, 22 bp, Artificial Sequence
  chemically synthesized
tgttgtctgctgaagcatccag

SEQ ID NO: 66030 - DNA, 22 bp, Artificial Sequence
  chemically synthesized
gttgtctgctgaagcatccaga

SEQ ID NO: 66031 - DNA, 22 bp, Artificial Sequence
  chemically synthesized
ttgtctgctgaagcatccagat

SEQ ID NO: 66032 - DNA, 22 bp, Artificial Sequence
  chemically synthesized
tctgctgaagcatccagataca

SEQ ID NO: 66033 - DNA, 22 bp, Artificial Sequence
  chemically synthesized
ctgaagcatccagatacatctt

SEQ ID NO: 66034 - DNA, 22 bp, Artificial Sequence
  chemically synthesized
aagcatccagatacatcttctg

SEQ ID NO: 66035 - DNA, 22 bp, Artificial Sequence
  chemically synthesized
ctgttttagattttccttactg

SEQ ID NO: 66036 - DNA, 22 bp, Artificial Sequence
  chemically synthesized
tgttttagattttccttactgt

SEQ ID NO: 66037 - DNA, 22 bp, Artificial Sequence
  chemically synthesized
ttttagattttccttactgtaa

SEQ ID NO: 66038 - DNA, 22 bp, Artificial Sequence
  chemically synthesized
tagattttccttactgtaatcc

SEQ ID NO: 66039 - DNA, 22 bp, Artificial Sequence
  chemically synthesized
agattttccttactgtaatcca

SEQ ID NO: 66040 - DNA, 22 bp, Artificial Sequence
  chemically synthesized
gattttccttactgtaatccac

SEQ ID NO: 66041 - DNA, 22 bp, Artificial Sequence
  chemically synthesized
tccttactgtaatccacgtctg

SEQ ID NO: 66042 - DNA, 22 bp, Artificial Sequence
  chemically synthesized
ccttactgtaatccacgtctgc

SEQ ID NO: 66043 - DNA, 22 bp, Artificial Sequence
  chemically synthesized
cttactgtaatccacgtctgct

SEQ ID NO: 66044 - DNA, 22 bp, Artificial Sequence
  chemically synthesized
actgtaatccacgtctgctaat

SEQ ID NO: 66045 - DNA, 22 bp, Artificial Sequence
  chemically synthesized
ctgtaatccacgtctgctaata

SEQ ID NO: 66046 - DNA, 22 bp, Artificial Sequence
  chemically synthesized
taatccacgtctgctaatatgc

SEQ ID NO: 66047 - DNA, 22 bp, Artificial Sequence
  chemically synthesized
ctaatatgccagctcattcatt

SEQ ID NO: 66048 - DNA, 22 bp, Artificial Sequence
  chemically synthesized
atatgccagctcattcatttga

SEQ ID NO: 66049 - DNA, 22 bp, Artificial Sequence
  chemically synthesized
attcatttgatgtttcctgggg

SEQ ID NO: 66050 - DNA, 22 bp, Artificial Sequence
  chemically synthesized
atttgatgtttcctggggacga

SEQ ID NO: 66051 - DNA, 22 bp, Artificial Sequence
  chemically synthesized
gatgtttcctggggacgagcat

SEQ ID NO: 66052 - DNA, 22 bp, Artificial Sequence
  chemically synthesized
atgtttcctggggacgagcatc

SEQ ID NO: 66053 - DNA, 22 bp, Artificial Sequence
  chemically synthesized
cctggggacgagcatcctctct

SEQ ID NO: 66054 - DNA, 22 bp, Artificial Sequence
  chemically synthesized
ctggggacgagcatcctctctt

SEQ ID NO: 66055 - DNA, 22 bp, Artificial Sequence
  chemically synthesized
gggacgagcatcctctcttgag

SEQ ID NO: 66056 - DNA, 22 bp, Artificial Sequence
  chemically synthesized
tcttgagttatttctgacaact

SEQ ID NO: 66057 - DNA, 22 bp, Artificial Sequence
  chemically synthesized
ttgagttatttctgacaactgc

SEQ ID NO: 66058 - DNA, 22 bp, Artificial Sequence
  chemically synthesized
gagttatttctgacaactgcag

SEQ ID NO: 66059 - DNA, 22 bp, Artificial Sequence
  chemically synthesized
agttatttctgacaactgcagc

SEQ ID NO: 66060 - DNA, 22 bp, Artificial Sequence
  chemically synthesized
tttctgacaactgcagcattcc

SEQ ID NO: 66061 - DNA, 22 bp, Artificial Sequence
  chemically synthesized
ctgacaactgcagcattccaca

SEQ ID NO: 66062 - DNA, 22 bp, Artificial Sequence
  chemically synthesized
tgacaactgcagcattccacag

SEQ ID NO: 66063 - DNA, 22 bp, Artificial Sequence
  chemically synthesized
acaactgcagcattccacaggg

SEQ ID NO: 66064 - DNA, 22 bp, Artificial Sequence
  chemically synthesized
cagcattccacagggtctgagt

SEQ ID NO: 66065 - DNA, 22 bp, Artificial Sequence
  chemically synthesized
cacagggtctgagttgttgaac

SEQ ID NO: 66066 - DNA, 22 bp, Artificial Sequence
  chemically synthesized
agttgttgaacacagtgcccta

SEQ ID NO: 66067 - DNA, 22 bp, Artificial Sequence
  chemically synthesized
ttgaacacagtgccctaactta

SEQ ID NO: 66068 - DNA, 22 bp, Artificial Sequence
  chemically synthesized
aacacagtgccctaacttaaat

SEQ ID NO: 66069 - DNA, 22 bp, Artificial Sequence
  chemically synthesized
acttaaatattacaatcaaaac

SEQ ID NO: 66070 - DNA, 22 bp, Artificial Sequence
  chemically synthesized
aaatattacaatcaaaacacat

SEQ ID NO: 66071 - DNA, 22 bp, Artificial Sequence
  chemically synthesized
aatattacaatcaaaacacatg

SEQ ID NO: 66072 - DNA, 22 bp, Artificial Sequence
  chemically synthesized
caatcaaaacacatgacataga

SEQ ID NO: 66073 - DNA, 22 bp, Artificial Sequence
  chemically synthesized
atttgggttctgccttggacag

SEQ ID NO: 66074 - DNA, 22 bp, Artificial Sequence
  chemically synthesized
gggttctgccttggacagagaa

SEQ ID NO: 66075 - DNA, 22 bp, Artificial Sequence
  chemically synthesized
ggttctgccttggacagagaaa

SEQ ID NO: 66076 - DNA, 22 bp, Artificial Sequence
  chemically synthesized
tgccttggacagagaaacagac

SEQ ID NO: 66077 - DNA, 22 bp, Artificial Sequence
  chemically synthesized
ccttggacagagaaacagactg

SEQ ID NO: 66078 - DNA, 22 bp, Artificial Sequence
  chemically synthesized
ggacagagaaacagactggggc

SEQ ID NO: 66079 - DNA, 22 bp, Artificial Sequence
  chemically synthesized
gacagagaaacagactggggct

SEQ ID NO: 66080 - DNA, 22 bp, Artificial Sequence
  chemically synthesized
gggctaaagggactgcagctat

SEQ ID NO: 66081 - DNA, 22 bp, Artificial Sequence
  chemically synthesized
aagggactgcagctatacctgg

SEQ ID NO: 66082 - DNA, 22 bp, Artificial Sequence
  chemically synthesized
cagctatacctggggacttgcc

SEQ ID NO: 66083 - DNA, 22 bp, Artificial Sequence
  chemically synthesized
tacctggggacttgcctgagat

SEQ ID NO: 66084 - DNA, 22 bp, Artificial Sequence
  chemically synthesized
gggacttgcctgagatcatctg

SEQ ID NO: 66085 - DNA, 22 bp, Artificial Sequence
  chemically synthesized
gcctgagatcatctgggacttg

SEQ ID NO: 66086 - DNA, 22 bp, Artificial Sequence
  chemically synthesized
cctgagatcatctgggacttgc

SEQ ID NO: 66087 - DNA, 22 bp, Artificial Sequence
  chemically synthesized
agatcatctgggacttgcctgg

SEQ ID NO: 66088 - DNA, 22 bp, Artificial Sequence
  chemically synthesized
ggacttgcctggtctcaagtct

SEQ ID NO: 66089 - DNA, 22 bp, Artificial Sequence
  chemically synthesized
gcctggtctcaagtcttctgac

SEQ ID NO: 66090 - DNA, 22 bp, Artificial Sequence
  chemically synthesized
cctggtctcaagtcttctgacc

SEQ ID NO: 66091 - DNA, 22 bp, Artificial Sequence
  chemically synthesized
gtctcaagtcttctgaccttgg

SEQ ID NO: 66092 - DNA, 22 bp, Artificial Sequence
  chemically synthesized
aagtcttctgaccttggccagg

SEQ ID NO: 66093 - DNA, 22 bp, Artificial Sequence
  chemically synthesized
ctgaccttggccagggatcttt

SEQ ID NO: 66094 - DNA, 22 bp, Artificial Sequence
  chemically synthesized
tgaccttggccagggatctttg

SEQ ID NO: 66095 - DNA, 22 bp, Artificial Sequence
  chemically synthesized
accttggccagggatctttgca

SEQ ID NO: 66096 - DNA, 22 bp, Artificial Sequence
  chemically synthesized
ggccagggatctttgcactggg

SEQ ID NO: 66097 - DNA, 22 bp, Artificial Sequence
  chemically synthesized
gccagggatctttgcactgggc

SEQ ID NO: 66098 - DNA, 22 bp, Artificial Sequence
  chemically synthesized
tgcactgggcaggggaatttga

SEQ ID NO: 66099 - DNA, 22 bp, Artificial Sequence
  chemically synthesized
gcactgggcaggggaatttgag

SEQ ID NO: 66100 - DNA, 22 bp, Artificial Sequence
  chemically synthesized
cactgggcaggggaatttgagt

SEQ ID NO: 66101 - DNA, 22 bp, Artificial Sequence
  chemically synthesized
ggcaggggaatttgagtcccaa

SEQ ID NO: 66102 - DNA, 22 bp, Artificial Sequence
  chemically synthesized
gagtcccaatttgaggcatcga

SEQ ID NO: 66103 - DNA, 22 bp, Artificial Sequence
  chemically synthesized
agtcccaatttgaggcatcgat

SEQ ID NO: 66104 - DNA, 22 bp, Artificial Sequence
  chemically synthesized
gaggcatcgatttaaaccactt

SEQ ID NO: 66105 - DNA, 22 bp, Artificial Sequence
  chemically synthesized
aggcatcgatttaaaccacttt

SEQ ID NO: 66106 - DNA, 22 bp, Artificial Sequence
  chemically synthesized
aaaccacttttcaaaggcctga

SEQ ID NO: 66107 - DNA, 22 bp, Artificial Sequence
  chemically synthesized
aaccacttttcaaaggcctgaa

SEQ ID NO: 66108 - DNA, 22 bp, Artificial Sequence
  chemically synthesized
ttcaaaggcctgaatggagctg

SEQ ID NO: 66109 - DNA, 22 bp, Artificial Sequence
  chemically synthesized
tcaaaggcctgaatggagctga

SEQ ID NO: 66110 - DNA, 22 bp, Artificial Sequence
  chemically synthesized
caaaggcctgaatggagctgat

SEQ ID NO: 66111 - DNA, 22 bp, Artificial Sequence
  chemically synthesized
aaaggcctgaatggagctgatt

SEQ ID NO: 66112 - DNA, 22 bp, Artificial Sequence
  chemically synthesized
aatggagctgattatttgtgtg

SEQ ID NO: 66113 - DNA, 22 bp, Artificial Sequence
  chemically synthesized
attatttgtgtgtcttcttttc

SEQ ID NO: 66114 - DNA, 22 bp, Artificial Sequence
  chemically synthesized
tttgtgtgtcttcttttcctgg

SEQ ID NO: 66115 - DNA, 22 bp, Artificial Sequence
  chemically synthesized
gtgtgtcttcttttcctggtct

SEQ ID NO: 66116 - DNA, 22 bp, Artificial Sequence
  chemically synthesized
tgtgtcttcttttcctggtctt

SEQ ID NO: 66117 - DNA, 22 bp, Artificial Sequence
  chemically synthesized
cttttcctggtcttccccttgt

SEQ ID NO: 66118 - DNA, 22 bp, Artificial Sequence
  chemically synthesized
ttttcctggtcttccccttgtc

SEQ ID NO: 66119 - DNA, 22 bp, Artificial Sequence
  chemically synthesized
ttcctggtcttccccttgtcaa

SEQ ID NO: 66120 - DNA, 22 bp, Artificial Sequence
  chemically synthesized
tcctggtcttccccttgtcaag

SEQ ID NO: 66121 - DNA, 22 bp, Artificial Sequence
  chemically synthesized
cctggtcttccccttgtcaaga

SEQ ID NO: 66122 - DNA, 22 bp, Artificial Sequence
  chemically synthesized
ctggtcttccccttgtcaagac

SEQ ID NO: 66123 - DNA, 22 bp, Artificial Sequence
  chemically synthesized
gtcttccccttgtcaagaccat

SEQ ID NO: 66124 - DNA, 22 bp, Artificial Sequence
  chemically synthesized
ccccttgtcaagaccatttctc

SEQ ID NO: 66125 - DNA, 22 bp, Artificial Sequence
  chemically synthesized
cccttgtcaagaccatttctct

SEQ ID NO: 66126 - DNA, 22 bp, Artificial Sequence
  chemically synthesized
gtcaagaccatttctctaccac

SEQ ID NO: 66127 - DNA, 22 bp, Artificial Sequence
  chemically synthesized
tcaagaccatttctctaccacg

SEQ ID NO: 66128 - DNA, 22 bp, Artificial Sequence
  chemically synthesized
ctctaccacgggatatatatta

SEQ ID NO: 66129 - DNA, 22 bp, Artificial Sequence
  chemically synthesized
tctaccacgggatatatattag

SEQ ID NO: 66130 - DNA, 22 bp, Artificial Sequence
  chemically synthesized
taccacgggatatatattagag

SEQ ID NO: 66131 - DNA, 22 bp, Artificial Sequence
  chemically synthesized
ccacgggatatatattagaggg

SEQ ID NO: 66132 - DNA, 22 bp, Artificial Sequence
  chemically synthesized
gaggggaaaacggctgtaaacc

SEQ ID NO: 66133 - DNA, 22 bp, Artificial Sequence
  chemically synthesized
taaaccctgattgttggctagc

SEQ ID NO: 66134 - DNA, 22 bp, Artificial Sequence
  chemically synthesized
attgttggctagcattgttcag

SEQ ID NO: 66135 - DNA, 22 bp, Artificial Sequence
  chemically synthesized
ttggctagcattgttcaggaag

SEQ ID NO: 66136 - DNA, 22 bp, Artificial Sequence
  chemically synthesized
gctagcattgttcaggaagtgt

SEQ ID NO: 66137 - DNA, 22 bp, Artificial Sequence
  chemically synthesized
gcattgttcaggaagtgtagca

SEQ ID NO: 66138 - DNA, 22 bp, Artificial Sequence
  chemically synthesized
ttcaggaagtgtagcattaagg

SEQ ID NO: 66139 - DNA, 22 bp, Artificial Sequence
  chemically synthesized
aggaagtgtagcattaaggagc

SEQ ID NO: 66140 - DNA, 22 bp, Artificial Sequence
  chemically synthesized
aggagcaacacttctctcgcct

SEQ ID NO: 66141 - DNA, 22 bp, Artificial Sequence
  chemically synthesized
ctctcgcctgtgttgattctcc

SEQ ID NO: 66142 - DNA, 22 bp, Artificial Sequence
  chemically synthesized
tctcgcctgtgttgattctcct

SEQ ID NO: 66143 - DNA, 22 bp, Artificial Sequence
  chemically synthesized
tcgcctgtgttgattctcctcc

SEQ ID NO: 66144 - DNA, 22 bp, Artificial Sequence
  chemically synthesized
gcctgtgttgattctcctccaa

SEQ ID NO: 66145 - DNA, 22 bp, Artificial Sequence
  chemically synthesized
tgttgattctcctccaactacc

SEQ ID NO: 66146 - DNA, 22 bp, Artificial Sequence
  chemically synthesized
attctcctccaactacccacac

SEQ ID NO: 66147 - DNA, 22 bp, Artificial Sequence
  chemically synthesized
tcctccaactacccacactatc

SEQ ID NO: 66148 - DNA, 22 bp, Artificial Sequence
  chemically synthesized
ctccaactacccacactatcct

SEQ ID NO: 66149 - DNA, 22 bp, Artificial Sequence
  chemically synthesized
caactacccacactatccttgc

SEQ ID NO: 66150 - DNA, 22 bp, Artificial Sequence
  chemically synthesized
cccacactatccttgcagttat

SEQ ID NO: 66151 - DNA, 22 bp, Artificial Sequence
  chemically synthesized
tccttgcagttattcatgggaa

SEQ ID NO: 66152 - DNA, 22 bp, Artificial Sequence
  chemically synthesized
gcagttattcatgggaaataat

SEQ ID NO: 66153 - DNA, 22 bp, Artificial Sequence
  chemically synthesized
cagttattcatgggaaataata

SEQ ID NO: 66154 - DNA, 22 bp, Artificial Sequence
  chemically synthesized
ttcatgggaaataatataaatc

SEQ ID NO: 66155 - DNA, 22 bp, Artificial Sequence
  chemically synthesized
atgggaaataatataaatcaca

SEQ ID NO: 66156 - DNA, 22 bp, Artificial Sequence
  chemically synthesized
cctgattcttctcaaacatctc

SEQ ID NO: 66157 - DNA, 22 bp, Artificial Sequence
  chemically synthesized
attcttctcaaacatctcgcaa

SEQ ID NO: 66158 - DNA, 22 bp, Artificial Sequence
  chemically synthesized
ttctcaaacatctcgcaaagta

SEQ ID NO: 66159 - DNA, 22 bp, Artificial Sequence
  chemically synthesized
ctcaaacatctcgcaaagtaat

SEQ ID NO: 66160 - DNA, 22 bp, Artificial Sequence
  chemically synthesized
tcaaacatctcgcaaagtaatc

SEQ ID NO: 66161 - DNA, 22 bp, Artificial Sequence
  chemically synthesized
aaacatctcgcaaagtaatcat

SEQ ID NO: 66162 - DNA, 22 bp, Artificial Sequence
  chemically synthesized
gcaaagtaatcatgggctgaag

SEQ ID NO: 66163 - DNA, 22 bp, Artificial Sequence
  chemically synthesized
aagtgcaggttttcttgcagtg

SEQ ID NO: 66164 - DNA, 22 bp, Artificial Sequence
  chemically synthesized
tcttgcagtgcctttatcagta

SEQ ID NO: 66165 - DNA, 22 bp, Artificial Sequence
  chemically synthesized
cttgcagtgcctttatcagtaa

SEQ ID NO: 66166 - DNA, 22 bp, Artificial Sequence
  chemically synthesized
ttgcagtgcctttatcagtaaa

SEQ ID NO: 66167 - DNA, 22 bp, Artificial Sequence
  chemically synthesized
gcagtgcctttatcagtaaatc

SEQ ID NO: 66168 - DNA, 22 bp, Artificial Sequence
  chemically synthesized
cagtgcctttatcagtaaatca

SEQ ID NO: 66169 - DNA, 22 bp, Artificial Sequence
  chemically synthesized
tatcagtaaatcagattttgag

SEQ ID NO: 66170 - DNA, 22 bp, Artificial Sequence
  chemically synthesized
atcagtaaatcagattttgagc

SEQ ID NO: 66171 - DNA, 22 bp, Artificial Sequence
  chemically synthesized
tcagtaaatcagattttgagca

SEQ ID NO: 66172 - DNA, 22 bp, Artificial Sequence
  chemically synthesized
tgagcatttatcagcaaaagtt

SEQ ID NO: 66173 - DNA, 22 bp, Artificial Sequence
  chemically synthesized
gagcatttatcagcaaaagtta

SEQ ID NO: 66174 - DNA, 22 bp, Artificial Sequence
  chemically synthesized
agcatttatcagcaaaagttag

SEQ ID NO: 66175 - DNA, 22 bp, Artificial Sequence
  chemically synthesized
atcagcaaaagttagacttaaa

SEQ ID NO: 66176 - DNA, 22 bp, Artificial Sequence
  chemically synthesized
tcagcaaaagttagacttaaac

SEQ ID NO: 66177 - DNA, 22 bp, Artificial Sequence
  chemically synthesized
gacttaaacatcatcatttctg

SEQ ID NO: 66178 - DNA, 22 bp, Artificial Sequence
  chemically synthesized
aaacatcatcatttctgtaatg

SEQ ID NO: 66179 - DNA, 22 bp, Artificial Sequence
  chemically synthesized
aacatcatcatttctgtaatgt

SEQ ID NO: 66180 - DNA, 22 bp, Artificial Sequence
  chemically synthesized
ctgtaatgtttgaaagaaagat

SEQ ID NO: 66181 - DNA, 22 bp, Artificial Sequence
  chemically synthesized
tgtaatgtttgaaagaaagatt

SEQ ID NO: 66182 - DNA, 22 bp, Artificial Sequence
  chemically synthesized
taatgtttgaaagaaagatttg

SEQ ID NO: 66183 - DNA, 22 bp, Artificial Sequence
  chemically synthesized
gaaagaaagatttgtttcagtg

SEQ ID NO: 66184 - DNA, 22 bp, Artificial Sequence
  chemically synthesized
aaagaaagatttgtttcagtgg

SEQ ID NO: 66185 - DNA, 22 bp, Artificial Sequence
  chemically synthesized
gtttcagtggggactctgccaa

SEQ ID NO: 66186 - DNA, 22 bp, Artificial Sequence
  chemically synthesized
tttcagtggggactctgccaat

SEQ ID NO: 66187 - DNA, 22 bp, Artificial Sequence
  chemically synthesized
cagtggggactctgccaatcaa

SEQ ID NO: 66188 - DNA, 22 bp, Artificial Sequence
  chemically synthesized
agtggggactctgccaatcaat

SEQ ID NO: 66189 - DNA, 22 bp, Artificial Sequence
  chemically synthesized
tgccaatcaatgatcttccagc

SEQ ID NO: 66190 - DNA, 22 bp, Artificial Sequence
  chemically synthesized
ccaatcaatgatcttccagctt

SEQ ID NO: 66191 - DNA, 22 bp, Artificial Sequence
  chemically synthesized
ccagcttgactctgctatcaat

SEQ ID NO: 66192 - DNA, 22 bp, Artificial Sequence
  chemically synthesized
cagcttgactctgctatcaatt

SEQ ID NO: 66193 - DNA, 22 bp, Artificial Sequence
  chemically synthesized
gactctgctatcaattattgct

SEQ ID NO: 66194 - DNA, 22 bp, Artificial Sequence
  chemically synthesized
actctgctatcaattattgctg

SEQ ID NO: 66195 - DNA, 22 bp, Artificial Sequence
  chemically synthesized
tgctatcaattattgctgcaat

SEQ ID NO: 66196 - DNA, 22 bp, Artificial Sequence
  chemically synthesized
ctatcaattattgctgcaatta

SEQ ID NO: 66197 - DNA, 22 bp, Artificial Sequence
  chemically synthesized
tcaattattgctgcaattattt

SEQ ID NO: 66198 - DNA, 22 bp, Artificial Sequence
  chemically synthesized
ttgctgcaattatttgtctagt

SEQ ID NO: 66199 - DNA, 22 bp, Artificial Sequence
  chemically synthesized
ctgcaattatttgtctagttgg

SEQ ID NO: 66200 - DNA, 22 bp, Artificial Sequence
  chemically synthesized
caattatttgtctagttggata

SEQ ID NO: 66201 - DNA, 22 bp, Artificial Sequence
  chemically synthesized
tttgtctagttggatatttaaa

SEQ ID NO: 66202 - DNA, 22 bp, Artificial Sequence
  chemically synthesized
gtctagttggatatttaaaatg

SEQ ID NO: 66203 - DNA, 22 bp, Artificial Sequence
  chemically synthesized
tctagttggatatttaaaatgt

SEQ ID NO: 66204 - DNA, 22 bp, Artificial Sequence
  chemically synthesized
gttggatatttaaaatgtcatc

SEQ ID NO: 66205 - DNA, 22 bp, Artificial Sequence
  chemically synthesized
gatatttaaaatgtcatcagaa

SEQ ID NO: 66206 - DNA, 22 bp, Artificial Sequence
  chemically synthesized
aaaatgtcatcagaaagagatg

SEQ ID NO: 66207 - DNA, 22 bp, Artificial Sequence
  chemically synthesized
aaatgtcatcagaaagagatga

SEQ ID NO: 66208 - DNA, 22 bp, Artificial Sequence
  chemically synthesized
cacattctagaaagcaaggcac

SEQ ID NO: 66209 - DNA, 22 bp, Artificial Sequence
  chemically synthesized
tagaaagcaaggcactgtataa

SEQ ID NO: 66210 - DNA, 22 bp, Artificial Sequence
  chemically synthesized
gaaagcaaggcactgtataatc

SEQ ID NO: 66211 - DNA, 22 bp, Artificial Sequence
  chemically synthesized
tataatcacatgaactgaatcc

SEQ ID NO: 66212 - DNA, 22 bp, Artificial Sequence
  chemically synthesized
aatccagttaaatgtagtgtgg

SEQ ID NO: 66213 - DNA, 22 bp, Artificial Sequence
  chemically synthesized
aatgtagtgtggtactaacctg

SEQ ID NO: 66214 - DNA, 22 bp, Artificial Sequence
  chemically synthesized
acctgtccttcaaaatagaatt

SEQ ID NO: 66215 - DNA, 22 bp, Artificial Sequence
  chemically synthesized
tccttcaaaatagaatttttga

SEQ ID NO: 66216 - DNA, 22 bp, Artificial Sequence
  chemically synthesized
caaaatagaatttttgagctac

SEQ ID NO: 66217 - DNA, 22 bp, Artificial Sequence
  chemically synthesized
aaaatagaatttttgagctacc

SEQ ID NO: 66218 - DNA, 22 bp, Artificial Sequence
  chemically synthesized
ttgagctaccactgaagcagca

SEQ ID NO: 66219 - DNA, 22 bp, Artificial Sequence
  chemically synthesized
tgagctaccactgaagcagcag

SEQ ID NO: 66220 - DNA, 22 bp, Artificial Sequence
  chemically synthesized
gagctaccactgaagcagcagt

SEQ ID NO: 66221 - DNA, 22 bp, Artificial Sequence
  chemically synthesized
agctaccactgaagcagcagtc

SEQ ID NO: 66222 - DNA, 22 bp, Artificial Sequence
  chemically synthesized
ccactgaagcagcagtcttctg

SEQ ID NO: 66223 - DNA, 22 bp, Artificial Sequence
  chemically synthesized
aagcagcagtcttctgccctgt

SEQ ID NO: 66224 - DNA, 22 bp, Artificial Sequence
  chemically synthesized
ctgccctgttttcaggaagctg

SEQ ID NO: 66225 - DNA, 22 bp, Artificial Sequence
  chemically synthesized
tgccctgttttcaggaagctga

SEQ ID NO: 66226 - DNA, 22 bp, Artificial Sequence
  chemically synthesized
ccctgttttcaggaagctgatc

SEQ ID NO: 66227 - DNA, 22 bp, Artificial Sequence
  chemically synthesized
ttttcaggaagctgatcttaac

SEQ ID NO: 66228 - DNA, 22 bp, Artificial Sequence
  chemically synthesized
tcaggaagctgatcttaacctt

SEQ ID NO: 66229 - DNA, 22 bp, Artificial Sequence
  chemically synthesized
caggaagctgatcttaaccttg

SEQ ID NO: 66230 - DNA, 22 bp, Artificial Sequence
  chemically synthesized
aggaagctgatcttaaccttgg

SEQ ID NO: 66231 - DNA, 22 bp, Artificial Sequence
  chemically synthesized
atcttaaccttgggatgcagtg

SEQ ID NO: 66232 - DNA, 22 bp, Artificial Sequence
  chemically synthesized
aaccttgggatgcagtgtgctt

SEQ ID NO: 66233 - DNA, 22 bp, Artificial Sequence
  chemically synthesized
accttgggatgcagtgtgcttt

SEQ ID NO: 66234 - DNA, 22 bp, Artificial Sequence
  chemically synthesized
gggatgcagtgtgctttcaggg

SEQ ID NO: 66235 - DNA, 22 bp, Artificial Sequence
  chemically synthesized
ggatgcagtgtgctttcagggt

SEQ ID NO: 66236 - DNA, 22 bp, Artificial Sequence
  chemically synthesized
tcagggttgggtgatacttaat

SEQ ID NO: 66237 - DNA, 22 bp, Artificial Sequence
  chemically synthesized
cagggttgggtgatacttaatt

SEQ ID NO: 66238 - DNA, 22 bp, Artificial Sequence
  chemically synthesized
agggttgggtgatacttaatta

SEQ ID NO: 66239 - DNA, 22 bp, Artificial Sequence
  chemically synthesized
ggtgatacttaattatggagaa

SEQ ID NO: 66240 - DNA, 22 bp, Artificial Sequence
  chemically synthesized
aattatggagaactttccaagt

SEQ ID NO: 66241 - DNA, 22 bp, Artificial Sequence
  chemically synthesized
attatggagaactttccaagtc

SEQ ID NO: 66242 - DNA, 22 bp, Artificial Sequence
  chemically synthesized
tggagaactttccaagtctgaa

SEQ ID NO: 66243 - DNA, 22 bp, Artificial Sequence
  chemically synthesized
tccaagtctgaaaatggaattg

SEQ ID NO: 66244 - DNA, 22 bp, Artificial Sequence
  chemically synthesized
ccaagtctgaaaatggaattgc

SEQ ID NO: 66245 - DNA, 22 bp, Artificial Sequence
  chemically synthesized
caagtctgaaaatggaattgct

SEQ ID NO: 66246 - DNA, 22 bp, Artificial Sequence
  chemically synthesized
aaaatggaattgctccttcaca

SEQ ID NO: 66247 - DNA, 22 bp, Artificial Sequence
  chemically synthesized
ctccttcacatacgcgagaagt

SEQ ID NO: 66248 - DNA, 22 bp, Artificial Sequence
  chemically synthesized
cttcacatacgcgagaagtgca

SEQ ID NO: 66249 - DNA, 22 bp, Artificial Sequence
  chemically synthesized
cacatacgcgagaagtgcattt

SEQ ID NO: 66250 - DNA, 22 bp, Artificial Sequence
  chemically synthesized
acatacgcgagaagtgcatttt

SEQ ID NO: 66251 - DNA, 22 bp, Artificial Sequence
  chemically synthesized
tggttatctcattcatctgcaa

SEQ ID NO: 66252 - DNA, 22 bp, Artificial Sequence
  chemically synthesized
ggttatctcattcatctgcaaa

SEQ ID NO: 66253 - DNA, 22 bp, Artificial Sequence
  chemically synthesized
gttatctcattcatctgcaaat

SEQ ID NO: 66254 - DNA, 22 bp, Artificial Sequence
  chemically synthesized
tctcattcatctgcaaatctat

SEQ ID NO: 66255 - DNA, 22 bp, Artificial Sequence
  chemically synthesized
attcatctgcaaatctataaat

SEQ ID NO: 66256 - DNA, 22 bp, Artificial Sequence
  chemically synthesized
atctgcaaatctataaataagc

SEQ ID NO: 66257 - DNA, 22 bp, Artificial Sequence
  chemically synthesized
caaatctataaataagcagtcc

SEQ ID NO: 66258 - DNA, 22 bp, Artificial Sequence
  chemically synthesized
taaataagcagtccctctattc

SEQ ID NO: 66259 - DNA, 22 bp, Artificial Sequence
  chemically synthesized
tattcttcttgcttcctgtgga

SEQ ID NO: 66260 - DNA, 22 bp, Artificial Sequence
  chemically synthesized
ttcttcttgcttcctgtggatt

SEQ ID NO: 66261 - DNA, 22 bp, Artificial Sequence
  chemically synthesized
ttcttgcttcctgtggatttaa

SEQ ID NO: 66262 - DNA, 22 bp, Artificial Sequence
  chemically synthesized
cttgcttcctgtggatttaaat

SEQ ID NO: 66263 - DNA, 22 bp, Artificial Sequence
  chemically synthesized
ttgcttcctgtggatttaaatg

SEQ ID NO: 66264 - DNA, 22 bp, Artificial Sequence
  chemically synthesized
gcttcctgtggatttaaatgcc

SEQ ID NO: 66265 - DNA, 22 bp, Artificial Sequence
  chemically synthesized
cttcctgtggatttaaatgcca

SEQ ID NO: 66266 - DNA, 22 bp, Artificial Sequence
  chemically synthesized
cctgtggatttaaatgccaaat

SEQ ID NO: 66267 - DNA, 22 bp, Artificial Sequence
  chemically synthesized
ctgtggatttaaatgccaaatc

SEQ ID NO: 66268 - DNA, 22 bp, Artificial Sequence
  chemically synthesized
tggatttaaatgccaaatcctg

SEQ ID NO: 66269 - DNA, 22 bp, Artificial Sequence
  chemically synthesized
aaatgccaaatcctgatttgtg

SEQ ID NO: 66270 - DNA, 22 bp, Artificial Sequence
  chemically synthesized
aatgccaaatcctgatttgtgg

SEQ ID NO: 66271 - DNA, 22 bp, Artificial Sequence
  chemically synthesized
atttgtggcaaagttgtcacat

SEQ ID NO: 66272 - DNA, 22 bp, Artificial Sequence
  chemically synthesized
gtggcaaagttgtcacatgccc

SEQ ID NO: 66273 - DNA, 22 bp, Artificial Sequence
  chemically synthesized
tggcaaagttgtcacatgcccc

SEQ ID NO: 66274 - DNA, 22 bp, Artificial Sequence
  chemically synthesized
tcacatgcccctttcccactct

SEQ ID NO: 66275 - DNA, 22 bp, Artificial Sequence
  chemically synthesized
tcccactctgtatgcctggtgc

SEQ ID NO: 66276 - DNA, 22 bp, Artificial Sequence
  chemically synthesized
cccactctgtatgcctggtgcc

SEQ ID NO: 66277 - DNA, 22 bp, Artificial Sequence
  chemically synthesized
ccactctgtatgcctggtgccc

SEQ ID NO: 66278 - DNA, 22 bp, Artificial Sequence
  chemically synthesized
tgtatgcctggtgcccaggaac

SEQ ID NO: 66279 - DNA, 22 bp, Artificial Sequence
  chemically synthesized
tatgcctggtgcccaggaacta

SEQ ID NO: 66280 - DNA, 22 bp, Artificial Sequence
  chemically synthesized
gtgcccaggaactaagcagtgg

SEQ ID NO: 66281 - DNA, 22 bp, Artificial Sequence
  chemically synthesized
agcagtggcagtggaaattaca

SEQ ID NO: 66282 - DNA, 22 bp, Artificial Sequence
  chemically synthesized
caactgtttggaagccaagaaa

SEQ ID NO: 66283 - DNA, 22 bp, Artificial Sequence
  chemically synthesized
tttggaagccaagaaaaaagct

SEQ ID NO: 66284 - DNA, 22 bp, Artificial Sequence
  chemically synthesized
ggaagccaagaaaaaagctcca

SEQ ID NO: 66285 - DNA, 22 bp, Artificial Sequence
  chemically synthesized
gaagccaagaaaaaagctccat

SEQ ID NO: 66286 - DNA, 22 bp, Artificial Sequence
  chemically synthesized
catttctcacttttctccagtt

SEQ ID NO: 66287 - DNA, 22 bp, Artificial Sequence
  chemically synthesized
ctcacttttctccagttccgga

SEQ ID NO: 66288 - DNA, 22 bp, Artificial Sequence
  chemically synthesized
tcacttttctccagttccggat

SEQ ID NO: 66289 - DNA, 22 bp, Artificial Sequence
  chemically synthesized
acttttctccagttccggatat

SEQ ID NO: 66290 - DNA, 22 bp, Artificial Sequence
  chemically synthesized
ttctccagttccggatattctc

SEQ ID NO: 66291 - DNA, 22 bp, Artificial Sequence
  chemically synthesized
tctccagttccggatattctcg

SEQ ID NO: 66292 - DNA, 22 bp, Artificial Sequence
  chemically synthesized
ctccagttccggatattctcgg

SEQ ID NO: 66293 - DNA, 22 bp, Artificial Sequence
  chemically synthesized
tccagttccggatattctcggc

SEQ ID NO: 66294 - DNA, 22 bp, Artificial Sequence
  chemically synthesized
cagttccggatattctcggctc

SEQ ID NO: 66295 - DNA, 22 bp, Artificial Sequence
  chemically synthesized
cggatattctcggctctgctcc

SEQ ID NO: 66296 - DNA, 22 bp, Artificial Sequence
  chemically synthesized
tcggctctgctccatgtatcag

SEQ ID NO: 66297 - DNA, 22 bp, Artificial Sequence
  chemically synthesized
ggctctgctccatgtatcagcc

SEQ ID NO: 66298 - DNA, 22 bp, Artificial Sequence
  chemically synthesized
tgctccatgtatcagcctcctc

SEQ ID NO: 66299 - DNA, 22 bp, Artificial Sequence
  chemically synthesized
ctccatgtatcagcctcctccc

SEQ ID NO: 66300 - DNA, 22 bp, Artificial Sequence
  chemically synthesized
catgtatcagcctcctccccac

SEQ ID NO: 66301 - DNA, 22 bp, Artificial Sequence
  chemically synthesized
ctccccacacacctcctccact

SEQ ID NO: 66302 - DNA, 22 bp, Artificial Sequence
  chemically synthesized
cccacacacctcctccactgca

SEQ ID NO: 66303 - DNA, 22 bp, Artificial Sequence
  chemically synthesized
ctccactgcacaccctccttct

SEQ ID NO: 66304 - DNA, 22 bp, Artificial Sequence
  chemically synthesized
cactgcacaccctccttctgtc

SEQ ID NO: 66305 - DNA, 22 bp, Artificial Sequence
  chemically synthesized
cacaccctccttctgtccgctc

SEQ ID NO: 66306 - DNA, 22 bp, Artificial Sequence
  chemically synthesized
cttctgtccgctccgtgaacag

SEQ ID NO: 66307 - DNA, 22 bp, Artificial Sequence
  chemically synthesized
ctgtccgctccgtgaacaggaa

SEQ ID NO: 66308 - DNA, 22 bp, Artificial Sequence
  chemically synthesized
tgtccgctccgtgaacaggaaa

SEQ ID NO: 66309 - DNA, 22 bp, Artificial Sequence
  chemically synthesized
tccgctccgtgaacaggaaaca

SEQ ID NO: 66310 - DNA, 22 bp, Artificial Sequence
  chemically synthesized
cgtgaacaggaaacagaaatac

SEQ ID NO: 66311 - DNA, 22 bp, Artificial Sequence
  chemically synthesized
caatttttttttttaatggagg

SEQ ID NO: 66312 - DNA, 22 bp, Artificial Sequence
  chemically synthesized
ttttttttaatggaggaagaga

SEQ ID NO: 66313 - DNA, 22 bp, Artificial Sequence
  chemically synthesized
tttttttaatggaggaagagaa

SEQ ID NO: 66314 - DNA, 22 bp, Artificial Sequence
  chemically synthesized
ttttttaatggaggaagagaaa

SEQ ID NO: 66315 - DNA, 22 bp, Artificial Sequence
  chemically synthesized
tttttaatggaggaagagaaac

SEQ ID NO: 66316 - DNA, 22 bp, Artificial Sequence
  chemically synthesized
ttttaatggaggaagagaaacc

SEQ ID NO: 66317 - DNA, 22 bp, Artificial Sequence
  chemically synthesized
tttaatggaggaagagaaacca

SEQ ID NO: 66318 - DNA, 22 bp, Artificial Sequence
  chemically synthesized
ttaatggaggaagagaaaccac

SEQ ID NO: 66319 - DNA, 22 bp, Artificial Sequence
  chemically synthesized
taatggaggaagagaaaccaca

SEQ ID NO: 66320 - DNA, 22 bp, Artificial Sequence
  chemically synthesized
aatggaggaagagaaaccacaa

SEQ ID NO: 66321 - DNA, 22 bp, Artificial Sequence
  chemically synthesized
atggaggaagagaaaccacaac

SEQ ID NO: 66322 - DNA, 22 bp, Artificial Sequence
  chemically synthesized
aaaaactaaactccaaccaaac

SEQ ID NO: 66323 - DNA, 22 bp, Artificial Sequence
  chemically synthesized
aactccaaccaaactaaactct

SEQ ID NO: 66324 - DNA, 22 bp, Artificial Sequence
  chemically synthesized
caaccaaactaaactctcaaga

SEQ ID NO: 66325 - DNA, 22 bp, Artificial Sequence
  chemically synthesized
aactctcaagatagaatcatga

SEQ ID NO: 66326 - DNA, 22 bp, Artificial Sequence
  chemically synthesized
tcaagatagaatcatgagagat

SEQ ID NO: 66327 - DNA, 22 bp, Artificial Sequence
  chemically synthesized
aagatagaatcatgagagatgc

SEQ ID NO: 66328 - DNA, 22 bp, Artificial Sequence
  chemically synthesized
agtggctcaaaccacccgcccc

SEQ ID NO: 66329 - DNA, 22 bp, Artificial Sequence
  chemically synthesized
aaaccacccgccccttaacagg

SEQ ID NO: 66330 - DNA, 22 bp, Artificial Sequence
  chemically synthesized
aacaggtctgcctctcttcctg

SEQ ID NO: 66331 - DNA, 22 bp, Artificial Sequence
  chemically synthesized
acaggtctgcctctcttcctgg

SEQ ID NO: 66332 - DNA, 22 bp, Artificial Sequence
  chemically synthesized
cctctcttcctgggagtcagaa

SEQ ID NO: 66333 - DNA, 22 bp, Artificial Sequence
  chemically synthesized
tcttcctgggagtcagaagtga

SEQ ID NO: 66334 - DNA, 22 bp, Artificial Sequence
  chemically synthesized
ttcctgggagtcagaagtgacc

SEQ ID NO: 66335 - DNA, 22 bp, Artificial Sequence
  chemically synthesized
cctgggagtcagaagtgacctt

SEQ ID NO: 66336 - DNA, 22 bp, Artificial Sequence
  chemically synthesized
ctgggagtcagaagtgaccttg

SEQ ID NO: 66337 - DNA, 22 bp, Artificial Sequence
  chemically synthesized
ggagtcagaagtgaccttgatg

SEQ ID NO: 66338 - DNA, 22 bp, Artificial Sequence
  chemically synthesized
gatgaactggatgttaggtcca

SEQ ID NO: 66339 - DNA, 22 bp, Artificial Sequence
  chemically synthesized
atgaactggatgttaggtccaa

SEQ ID NO: 66340 - DNA, 22 bp, Artificial Sequence
  chemically synthesized
gatgttaggtccaaaaatgaca

SEQ ID NO: 66341 - DNA, 22 bp, Artificial Sequence
  chemically synthesized
ggtccaaaaatgacaaacaagc

SEQ ID NO: 66342 - DNA, 22 bp, Artificial Sequence
  chemically synthesized
cactgggaaacatcagtccaac

SEQ ID NO: 66343 - DNA, 22 bp, Artificial Sequence
  chemically synthesized
ggaaacatcagtccaacccctt

SEQ ID NO: 66344 - DNA, 22 bp, Artificial Sequence
  chemically synthesized
tcttttgacagcaggactagaa

SEQ ID NO: 66345 - DNA, 22 bp, Artificial Sequence
  chemically synthesized
cttttgacagcaggactagaac

SEQ ID NO: 66346 - DNA, 22 bp, Artificial Sequence
  chemically synthesized
ttttgacagcaggactagaaca

SEQ ID NO: 66347 - DNA, 22 bp, Artificial Sequence
  chemically synthesized
ttgacagcaggactagaacaga

SEQ ID NO: 66348 - DNA, 22 bp, Artificial Sequence
  chemically synthesized
tgacagcaggactagaacagac

SEQ ID NO: 66349 - DNA, 22 bp, Artificial Sequence
  chemically synthesized
gacagcaggactagaacagacc

SEQ ID NO: 66350 - DNA, 22 bp, Artificial Sequence
  chemically synthesized
acagcaggactagaacagacca

SEQ ID NO: 66351 - DNA, 22 bp, Artificial Sequence
  chemically synthesized
gaacagaccagaggttccggag

SEQ ID NO: 66352 - DNA, 22 bp, Artificial Sequence
  chemically synthesized
cggagaaggtctctatacctag

SEQ ID NO: 66353 - DNA, 22 bp, Artificial Sequence
  chemically synthesized
tatacctaggtgggtttcctga

SEQ ID NO: 66354 - DNA, 22 bp, Artificial Sequence
  chemically synthesized
tacctaggtgggtttcctgagc

SEQ ID NO: 66355 - DNA, 22 bp, Artificial Sequence
  chemically synthesized
ggtgggtttcctgagctggaga

SEQ ID NO: 66356 - DNA, 22 bp, Artificial Sequence
  chemically synthesized
cctgagctggagaattttccat

SEQ ID NO: 66357 - DNA, 22 bp, Artificial Sequence
  chemically synthesized
ctgagctggagaattttccatg

SEQ ID NO: 66358 - DNA, 22 bp, Artificial Sequence
  chemically synthesized
agctggagaattttccatgggg

SEQ ID NO: 66359 - DNA, 22 bp, Artificial Sequence
  chemically synthesized
gagaattttccatggggctgtc

SEQ ID NO: 66360 - DNA, 22 bp, Artificial Sequence
  chemically synthesized
tccatggggctgtctgtgtgtt

SEQ ID NO: 66361 - DNA, 22 bp, Artificial Sequence
  chemically synthesized
ccatggggctgtctgtgtgttg

SEQ ID NO: 66362 - DNA, 22 bp, Artificial Sequence
  chemically synthesized
catggggctgtctgtgtgttga

SEQ ID NO: 66363 - DNA, 22 bp, Artificial Sequence
  chemically synthesized
tctgtgtgttgaggcttttccc

SEQ ID NO: 66364 - DNA, 22 bp, Artificial Sequence
  chemically synthesized
tgtgttgaggcttttccccatt

SEQ ID NO: 66365 - DNA, 22 bp, Artificial Sequence
  chemically synthesized
aggcttttccccattcactttc

SEQ ID NO: 66366 - DNA, 22 bp, Artificial Sequence
  chemically synthesized
ttccccattcactttcccaatt

SEQ ID NO: 66367 - DNA, 22 bp, Artificial Sequence
  chemically synthesized
tccccattcactttcccaattc

SEQ ID NO: 66368 - DNA, 22 bp, Artificial Sequence
  chemically synthesized
ccccattcactttcccaattca

SEQ ID NO: 66369 - DNA, 22 bp, Artificial Sequence
  chemically synthesized
cccattcactttcccaattcac

SEQ ID NO: 66370 - DNA, 22 bp, Artificial Sequence
  chemically synthesized
actttcccaattcacttcccag

SEQ ID NO: 66371 - DNA, 22 bp, Artificial Sequence
  chemically synthesized
tcccaattcacttcccagagag

SEQ ID NO: 66372 - DNA, 22 bp, Artificial Sequence
  chemically synthesized
cccaattcacttcccagagagc

SEQ ID NO: 66373 - DNA, 22 bp, Artificial Sequence
  chemically synthesized
ccaattcacttcccagagagca

SEQ ID NO: 66374 - DNA, 22 bp, Artificial Sequence
  chemically synthesized
acttcccagagagcatgctgag

SEQ ID NO: 66375 - DNA, 22 bp, Artificial Sequence
  chemically synthesized
cccagagagcatgctgagctca

SEQ ID NO: 66376 - DNA, 22 bp, Artificial Sequence
  chemically synthesized
ccagagagcatgctgagctcat

SEQ ID NO: 66377 - DNA, 22 bp, Artificial Sequence
  chemically synthesized
agctcattccaggacactgtga

SEQ ID NO: 66378 - DNA, 22 bp, Artificial Sequence
  chemically synthesized
attccaggacactgtgatggtc

SEQ ID NO: 66379 - DNA, 22 bp, Artificial Sequence
  chemically synthesized
caggacactgtgatggtcaaaa

SEQ ID NO: 66380 - DNA, 22 bp, Artificial Sequence
  chemically synthesized
tgatggtcaaaaggctctccca

SEQ ID NO: 66381 - DNA, 22 bp, Artificial Sequence
  chemically synthesized
tcccaccatcacacagaatgta

SEQ ID NO: 66382 - DNA, 22 bp, Artificial Sequence
  chemically synthesized
ccaccatcacacagaatgtact

SEQ ID NO: 66383 - DNA, 22 bp, Artificial Sequence
  chemically synthesized
gggttctgttagaaaattaatc

SEQ ID NO: 66384 - DNA, 22 bp, Artificial Sequence
  chemically synthesized
tgttagaaaattaatctcactt

SEQ ID NO: 66385 - DNA, 22 bp, Artificial Sequence
  chemically synthesized
ttagaaaattaatctcacttgt

SEQ ID NO: 66386 - DNA, 22 bp, Artificial Sequence
  chemically synthesized
gaaaattaatctcacttgtgga

SEQ ID NO: 66387 - DNA, 22 bp, Artificial Sequence
  chemically synthesized
atctcacttgtggaaaaaaaat

SEQ ID NO: 66388 - DNA, 22 bp, Artificial Sequence
  chemically synthesized
acttgtggaaaaaaaatgccct

SEQ ID NO: 66389 - DNA, 22 bp, Artificial Sequence
  chemically synthesized
gtggaaaaaaaatgcccttaaa

SEQ ID NO: 66390 - DNA, 22 bp, Artificial Sequence
  chemically synthesized
tggaaaaaaaatgcccttaaaa

SEQ ID NO: 66391 - DNA, 22 bp, Artificial Sequence
  chemically synthesized
aaaacactggagccctgagttg

SEQ ID NO: 66392 - DNA, 22 bp, Artificial Sequence
  chemically synthesized
aaacactggagccctgagttgt

SEQ ID NO: 66393 - DNA, 22 bp, Artificial Sequence
  chemically synthesized
gagccctgagttgtatgtgctg

SEQ ID NO: 66394 - DNA, 22 bp, Artificial Sequence
  chemically synthesized
agttgtatgtgctggagcatgt

SEQ ID NO: 66395 - DNA, 22 bp, Artificial Sequence
  chemically synthesized
tatgtgctggagcatgtgggga

SEQ ID NO: 66396 - DNA, 22 bp, Artificial Sequence
  chemically synthesized
gagcatgtggggaaaagaaaga

SEQ ID NO: 66397 - DNA, 22 bp, Artificial Sequence
  chemically synthesized
acgagccatggaaatggagaag

SEQ ID NO: 66398 - DNA, 22 bp, Artificial Sequence
  chemically synthesized
tttctgctgcagttgctcttag

SEQ ID NO: 66399 - DNA, 22 bp, Artificial Sequence
  chemically synthesized
ctgctgcagttgctcttagcca

SEQ ID NO: 66400 - DNA, 22 bp, Artificial Sequence
  chemically synthesized
tgctgcagttgctcttagccag

SEQ ID NO: 66401 - DNA, 22 bp, Artificial Sequence
  chemically synthesized
ctgcagttgctcttagccaggg

SEQ ID NO: 66402 - DNA, 22 bp, Artificial Sequence
  chemically synthesized
cagttgctcttagccaggggcc

SEQ ID NO: 66403 - DNA, 22 bp, Artificial Sequence
  chemically synthesized
ctcttagccaggggccagcgtg

SEQ ID NO: 66404 - DNA, 22 bp, Artificial Sequence
  chemically synthesized
ttagccaggggccagcgtggac

SEQ ID NO: 66405 - DNA, 22 bp, Artificial Sequence
  chemically synthesized
agccaggggccagcgtggacag

SEQ ID NO: 66406 - DNA, 22 bp, Artificial Sequence
  chemically synthesized
gccaggggccagcgtggacagc

SEQ ID NO: 66407 - DNA, 22 bp, Artificial Sequence
  chemically synthesized
tcaccttgatccctgtcctcct

SEQ ID NO: 66408 - DNA, 22 bp, Artificial Sequence
  chemically synthesized
gatccctgtcctccttcacctg

SEQ ID NO: 66409 - DNA, 22 bp, Artificial Sequence
  chemically synthesized
atccctgtcctccttcacctgc

SEQ ID NO: 66410 - DNA, 22 bp, Artificial Sequence
  chemically synthesized
tcctccttcacctgccagcttg

SEQ ID NO: 66411 - DNA, 22 bp, Artificial Sequence
  chemically synthesized
cttcacctgccagcttgtgggc

SEQ ID NO: 66412 - DNA, 22 bp, Artificial Sequence
  chemically synthesized
cacctgccagcttgtgggctgg

SEQ ID NO: 66413 - DNA, 22 bp, Artificial Sequence
  chemically synthesized
acctgccagcttgtgggctggg

SEQ ID NO: 66414 - DNA, 22 bp, Artificial Sequence
  chemically synthesized
ccagcttgtgggctgggtggct

SEQ ID NO: 66415 - DNA, 22 bp, Artificial Sequence
  chemically synthesized
gtgggctgggtggcttaagttc

SEQ ID NO: 66416 - DNA, 22 bp, Artificial Sequence
  chemically synthesized
tgggctgggtggcttaagttct

SEQ ID NO: 66417 - DNA, 22 bp, Artificial Sequence
  chemically synthesized
ggtggcttaagttctagccctg

SEQ ID NO: 66418 - DNA, 22 bp, Artificial Sequence
  chemically synthesized
aagttctagccctgggtgaccc

SEQ ID NO: 66419 - DNA, 22 bp, Artificial Sequence
  chemically synthesized
agttctagccctgggtgaccct

SEQ ID NO: 66420 - DNA, 22 bp, Artificial Sequence
  chemically synthesized
tagccctgggtgaccctctgac

SEQ ID NO: 66421 - DNA, 22 bp, Artificial Sequence
  chemically synthesized
gccctgggtgaccctctgactc

SEQ ID NO: 66422 - DNA, 22 bp, Artificial Sequence
  chemically synthesized
ggtgaccctctgactcctgaga

SEQ ID NO: 66423 - DNA, 22 bp, Artificial Sequence
  chemically synthesized
tgactcctgagagcatgtgtat

SEQ ID NO: 66424 - DNA, 22 bp, Artificial Sequence
  chemically synthesized
actcctgagagcatgtgtatgt

SEQ ID NO: 66425 - DNA, 22 bp, Artificial Sequence
  chemically synthesized
ctgagagcatgtgtatgtgctt

SEQ ID NO: 66426 - DNA, 22 bp, Artificial Sequence
  chemically synthesized
agagcatgtgtatgtgcttgtg

SEQ ID NO: 66427 - DNA, 22 bp, Artificial Sequence
  chemically synthesized
gtggtgggtggggtgtagtgcg

SEQ ID NO: 66428 - DNA, 22 bp, Artificial Sequence
  chemically synthesized
tggtgggtggggtgtagtgcgt

SEQ ID NO: 66429 - DNA, 22 bp, Artificial Sequence
  chemically synthesized
aagccgcaaagcagaggtgcga

SEQ ID NO: 66430 - DNA, 22 bp, Artificial Sequence
  chemically synthesized
gtgtaggtcgtgggagacagag

SEQ ID NO: 66431 - DNA, 22 bp, Artificial Sequence
  chemically synthesized
ggttctgaatgtttttactttt

SEQ ID NO: 66432 - DNA, 22 bp, Artificial Sequence
  chemically synthesized
tgaatgtttttacttttcctag

SEQ ID NO: 66433 - DNA, 22 bp, Artificial Sequence
  chemically synthesized
aatgtttttacttttcctagga

SEQ ID NO: 66434 - DNA, 22 bp, Artificial Sequence
  chemically synthesized
ttacttttcctaggatccctgc

SEQ ID NO: 66435 - DNA, 22 bp, Artificial Sequence
  chemically synthesized
tacttttcctaggatccctgct

SEQ ID NO: 66436 - DNA, 22 bp, Artificial Sequence
  chemically synthesized
acttttcctaggatccctgctt

SEQ ID NO: 66437 - DNA, 22 bp, Artificial Sequence
  chemically synthesized
cttttcctaggatccctgcttc

SEQ ID NO: 66438 - DNA, 22 bp, Artificial Sequence
  chemically synthesized
ttcctaggatccctgcttcatt

SEQ ID NO: 66439 - DNA, 22 bp, Artificial Sequence
  chemically synthesized
tcctaggatccctgcttcattt

SEQ ID NO: 66440 - DNA, 22 bp, Artificial Sequence
  chemically synthesized
cctaggatccctgcttcatttt

SEQ ID NO: 66441 - DNA, 22 bp, Artificial Sequence
  chemically synthesized
ctaggatccctgcttcattttt

SEQ ID NO: 66442 - DNA, 22 bp, Artificial Sequence
  chemically synthesized
ggatccctgcttcatttttgtt

SEQ ID NO: 66443 - DNA, 22 bp, Artificial Sequence
  chemically synthesized
cttcatttttgttttcaaggag

SEQ ID NO: 66444 - DNA, 22 bp, Artificial Sequence
  chemically synthesized
catttttgttttcaaggagtta

SEQ ID NO: 66445 - DNA, 22 bp, Artificial Sequence
  chemically synthesized
atttttgttttcaaggagttac

SEQ ID NO: 66446 - DNA, 22 bp, Artificial Sequence
  chemically synthesized
ttgttttcaaggagttacttgt

SEQ ID NO: 66447 - DNA, 22 bp, Artificial Sequence
  chemically synthesized
tgttttcaaggagttacttgtt

SEQ ID NO: 66448 - DNA, 22 bp, Artificial Sequence
  chemically synthesized
gttttcaaggagttacttgttt

SEQ ID NO: 66449 - DNA, 22 bp, Artificial Sequence
  chemically synthesized
ttttcaaggagttacttgtttc

SEQ ID NO: 66450 - DNA, 22 bp, Artificial Sequence
  chemically synthesized
tcaaggagttacttgtttctct

SEQ ID NO: 66451 - DNA, 22 bp, Artificial Sequence
  chemically synthesized
caaggagttacttgtttctctc

SEQ ID NO: 66452 - DNA, 22 bp, Artificial Sequence
  chemically synthesized
aaggagttacttgtttctctct

SEQ ID NO: 66453 - DNA, 22 bp, Artificial Sequence
  chemically synthesized
cttgtttctctcttcttgcctt

SEQ ID NO: 66454 - DNA, 22 bp, Artificial Sequence
  chemically synthesized
gtttctctcttcttgccttcca

SEQ ID NO: 66455 - DNA, 22 bp, Artificial Sequence
  chemically synthesized
tttctctcttcttgccttccag

SEQ ID NO: 66456 - DNA, 22 bp, Artificial Sequence
  chemically synthesized
ctctcttcttgccttccagcat

SEQ ID NO: 66457 - DNA, 22 bp, Artificial Sequence
  chemically synthesized
tctcttcttgccttccagcatg

SEQ ID NO: 66458 - DNA, 22 bp, Artificial Sequence
  chemically synthesized
tcttcttgccttccagcatgtc

SEQ ID NO: 66459 - DNA, 22 bp, Artificial Sequence
  chemically synthesized
ttcttgccttccagcatgtccc

SEQ ID NO: 66460 - DNA, 22 bp, Artificial Sequence
  chemically synthesized
cttgccttccagcatgtcccaa

SEQ ID NO: 66461 - DNA, 22 bp, Artificial Sequence
  chemically synthesized
ttgccttccagcatgtcccaag

SEQ ID NO: 66462 - DNA, 22 bp, Artificial Sequence
  chemically synthesized
gccttccagcatgtcccaagca

SEQ ID NO: 66463 - DNA, 22 bp, Artificial Sequence
  chemically synthesized
ccttccagcatgtcccaagcag

SEQ ID NO: 66464 - DNA, 22 bp, Artificial Sequence
  chemically synthesized
ccagcatgtcccaagcagagat

SEQ ID NO: 66465 - DNA, 22 bp, Artificial Sequence
  chemically synthesized
cagcatgtcccaagcagagatg

SEQ ID NO: 66466 - DNA, 22 bp, Artificial Sequence
  chemically synthesized
ggtttgggaatggggtgctggg

SEQ ID NO: 66467 - DNA, 22 bp, Artificial Sequence
  chemically synthesized
gggaatggggtgctgggagggg

SEQ ID NO: 66468 - DNA, 22 bp, Artificial Sequence
  chemically synthesized
ggaatggggtgctgggagggga

SEQ ID NO: 66469 - DNA, 22 bp, Artificial Sequence
  chemically synthesized
ggaggggaggggatatcccatt

SEQ ID NO: 66470 - DNA, 22 bp, Artificial Sequence
  chemically synthesized
cagggcccttcccagttttggg

SEQ ID NO: 66471 - DNA, 22 bp, Artificial Sequence
  chemically synthesized
cccagttttggggctgggaagc

SEQ ID NO: 66472 - DNA, 22 bp, Artificial Sequence
  chemically synthesized
ccagttttggggctgggaagcc

SEQ ID NO: 66473 - DNA, 22 bp, Artificial Sequence
  chemically synthesized
tggggctgggaagcctcaatct

SEQ ID NO: 66474 - DNA, 22 bp, Artificial Sequence
  chemically synthesized
ggggctgggaagcctcaatctc

SEQ ID NO: 66475 - DNA, 22 bp, Artificial Sequence
  chemically synthesized
gggctgggaagcctcaatctcc

SEQ ID NO: 66476 - DNA, 22 bp, Artificial Sequence
  chemically synthesized
ggaagcctcaatctccttgagc

SEQ ID NO: 66477 - DNA, 22 bp, Artificial Sequence
  chemically synthesized
aatctccttgagcacagcaggg

SEQ ID NO: 66478 - DNA, 22 bp, Artificial Sequence
  chemically synthesized
cttgagcacagcagggctttgc

SEQ ID NO: 66479 - DNA, 22 bp, Artificial Sequence
  chemically synthesized
gagcacagcagggctttgcctt

SEQ ID NO: 66480 - DNA, 22 bp, Artificial Sequence
  chemically synthesized
agcacagcagggctttgccttc

SEQ ID NO: 66481 - DNA, 22 bp, Artificial Sequence
  chemically synthesized
tgccttctttcttccctgagct

SEQ ID NO: 66482 - DNA, 22 bp, Artificial Sequence
  chemically synthesized
gccttctttcttccctgagctg

SEQ ID NO: 66483 - DNA, 22 bp, Artificial Sequence
  chemically synthesized
ccttctttcttccctgagctgc

SEQ ID NO: 66484 - DNA, 22 bp, Artificial Sequence
  chemically synthesized
ctttcttccctgagctgcggcc

SEQ ID NO: 66485 - DNA, 22 bp, Artificial Sequence
  chemically synthesized
tttcttccctgagctgcggcca

SEQ ID NO: 66486 - DNA, 22 bp, Artificial Sequence
  chemically synthesized
tcttccctgagctgcggccacc

SEQ ID NO: 66487 - DNA, 22 bp, Artificial Sequence
  chemically synthesized
cttccctgagctgcggccacca

SEQ ID NO: 66488 - DNA, 22 bp, Artificial Sequence
  chemically synthesized
ttccctgagctgcggccaccac

SEQ ID NO: 66489 - DNA, 22 bp, Artificial Sequence
  chemically synthesized
ccctgagctgcggccaccactg

SEQ ID NO: 66490 - DNA, 22 bp, Artificial Sequence
  chemically synthesized
cctgagctgcggccaccactgg

SEQ ID NO: 66491 - DNA, 22 bp, Artificial Sequence
  chemically synthesized
agctgcggccaccactgggctg

SEQ ID NO: 66492 - DNA, 22 bp, Artificial Sequence
  chemically synthesized
cggccaccactgggctgtacca

SEQ ID NO: 66493 - DNA, 22 bp, Artificial Sequence
  chemically synthesized
ggctgtaccaggatctagtgca

SEQ ID NO: 66494 - DNA, 22 bp, Artificial Sequence
  chemically synthesized
taccaggatctagtgcaacttg

SEQ ID NO: 66495 - DNA, 22 bp, Artificial Sequence
  chemically synthesized
gtgcaacttgggtgacaaggtg

SEQ ID NO: 66496 - DNA, 22 bp, Artificial Sequence
  chemically synthesized
gggtgacaaggtgtgggtggct

SEQ ID NO: 66497 - DNA, 22 bp, Artificial Sequence
  chemically synthesized
ggtgacaaggtgtgggtggctg

SEQ ID NO: 66498 - DNA, 22 bp, Artificial Sequence
  chemically synthesized
caggtgttctccctgcatctga

SEQ ID NO: 66499 - DNA, 22 bp, Artificial Sequence
  chemically synthesized
tccctgcatctgaggcagggag

SEQ ID NO: 66500 - DNA, 22 bp, Artificial Sequence
  chemically synthesized
cctgcatctgaggcagggaggc

SEQ ID NO: 66501 - DNA, 22 bp, Artificial Sequence
  chemically synthesized
catctgaggcagggaggcagct

SEQ ID NO: 66502 - DNA, 22 bp, Artificial Sequence
  chemically synthesized
aggcagggaggcagctgggggc

SEQ ID NO: 66503 - DNA, 22 bp, Artificial Sequence
  chemically synthesized
ggggcttccagccagcctgtaa

SEQ ID NO: 66504 - DNA, 22 bp, Artificial Sequence
  chemically synthesized
ccagccagcctgtaatgcccct

SEQ ID NO: 66505 - DNA, 22 bp, Artificial Sequence
  chemically synthesized
cagccagcctgtaatgcccctc

SEQ ID NO: 66506 - DNA, 22 bp, Artificial Sequence
  chemically synthesized
taatgcccctcccaggtctagc

SEQ ID NO: 66507 - DNA, 22 bp, Artificial Sequence
  chemically synthesized
ccaggtctagcttcctagcctt

SEQ ID NO: 66508 - DNA, 22 bp, Artificial Sequence
  chemically synthesized
gcttcctagccttatttttaag

SEQ ID NO: 66509 - DNA, 22 bp, Artificial Sequence
  chemically synthesized
cctagccttatttttaagccct

SEQ ID NO: 66510 - DNA, 22 bp, Artificial Sequence
  chemically synthesized
ctagccttatttttaagccctt

SEQ ID NO: 66511 - DNA, 22 bp, Artificial Sequence
  chemically synthesized
gccttatttttaagccctttta

SEQ ID NO: 66512 - DNA, 22 bp, Artificial Sequence
  chemically synthesized
atttttaagcccttttagtgga

SEQ ID NO: 66513 - DNA, 22 bp, Artificial Sequence
  chemically synthesized
tttttaagcccttttagtggag

SEQ ID NO: 66514 - DNA, 22 bp, Artificial Sequence
  chemically synthesized
ttaagcccttttagtggagcaa

SEQ ID NO: 66515 - DNA, 22 bp, Artificial Sequence
  chemically synthesized
taagcccttttagtggagcaaa

SEQ ID NO: 66516 - DNA, 22 bp, Artificial Sequence
  chemically synthesized
aagcccttttagtggagcaaaa

SEQ ID NO: 66517 - DNA, 22 bp, Artificial Sequence
  chemically synthesized
agcccttttagtggagcaaaaa

SEQ ID NO: 66518 - DNA, 22 bp, Artificial Sequence
  chemically synthesized
ttagtggagcaaaaactattta

SEQ ID NO: 66519 - DNA, 22 bp, Artificial Sequence
  chemically synthesized
tagtggagcaaaaactatttag

SEQ ID NO: 66520 - DNA, 22 bp, Artificial Sequence
  chemically synthesized
agtggagcaaaaactatttaga

SEQ ID NO: 66521 - DNA, 22 bp, Artificial Sequence
  chemically synthesized
gtggagcaaaaactatttagaa

SEQ ID NO: 66522 - DNA, 22 bp, Artificial Sequence
  chemically synthesized
tttagaactatgagttcaaaaa

SEQ ID NO: 66523 - DNA, 22 bp, Artificial Sequence
  chemically synthesized
agaactatgagttcaaaaatag

SEQ ID NO: 66524 - DNA, 22 bp, Artificial Sequence
  chemically synthesized
gaactatgagttcaaaaatagg

SEQ ID NO: 66525 - DNA, 22 bp, Artificial Sequence
  chemically synthesized
tgagttcaaaaataggattatt

SEQ ID NO: 66526 - DNA, 22 bp, Artificial Sequence
  chemically synthesized
aaaaataggattattcaagcgg

SEQ ID NO: 66527 - DNA, 22 bp, Artificial Sequence
  chemically synthesized
ttcaagcggaggtacttcacac

SEQ ID NO: 66528 - DNA, 22 bp, Artificial Sequence
  chemically synthesized
aagcggaggtacttcacactgt

SEQ ID NO: 66529 - DNA, 22 bp, Artificial Sequence
  chemically synthesized
cacactgttctttctcttggga

SEQ ID NO: 66530 - DNA, 22 bp, Artificial Sequence
  chemically synthesized
acactgttctttctcttgggac

SEQ ID NO: 66531 - DNA, 22 bp, Artificial Sequence
  chemically synthesized
ttctttctcttgggacagagat

SEQ ID NO: 66532 - DNA, 22 bp, Artificial Sequence
  chemically synthesized
tttctcttgggacagagatggg

SEQ ID NO: 66533 - DNA, 22 bp, Artificial Sequence
  chemically synthesized
tctcttgggacagagatggggg

SEQ ID NO: 66534 - DNA, 22 bp, Artificial Sequence
  chemically synthesized
ctcttgggacagagatgggggt

SEQ ID NO: 66535 - DNA, 22 bp, Artificial Sequence
  chemically synthesized
tcttgggacagagatgggggtg

SEQ ID NO: 66536 - DNA, 22 bp, Artificial Sequence
  chemically synthesized
ttgggacagagatgggggtgca

SEQ ID NO: 66537 - DNA, 22 bp, Artificial Sequence
  chemically synthesized
gggacagagatgggggtgcagg

SEQ ID NO: 66538 - DNA, 22 bp, Artificial Sequence
  chemically synthesized
ggacagagatgggggtgcaggt

SEQ ID NO: 66539 - DNA, 22 bp, Artificial Sequence
  chemically synthesized
ctaaaacaaattgagagaggaa

SEQ ID NO: 66540 - DNA, 22 bp, Artificial Sequence
  chemically synthesized
aaacaaattgagagaggaagga

SEQ ID NO: 66541 - DNA, 22 bp, Artificial Sequence
  chemically synthesized
agagaggaaggaagaaagggac

SEQ ID NO: 66542 - DNA, 22 bp, Artificial Sequence
  chemically synthesized
gtaattgagaccaattcaccag

SEQ ID NO: 66543 - DNA, 22 bp, Artificial Sequence
  chemically synthesized
agaccaattcaccagaagactt

SEQ ID NO: 66544 - DNA, 22 bp, Artificial Sequence
  chemically synthesized
accagaagacttaaggaaattt

SEQ ID NO: 66545 - DNA, 22 bp, Artificial Sequence
  chemically synthesized
aaggaaatttgacatccgctgt

SEQ ID NO: 66546 - DNA, 22 bp, Artificial Sequence
  chemically synthesized
aggaaatttgacatccgctgta

SEQ ID NO: 66547 - DNA, 22 bp, Artificial Sequence
  chemically synthesized
gacatccgctgtagctctttta

SEQ ID NO: 66548 - DNA, 22 bp, Artificial Sequence
  chemically synthesized
acatccgctgtagctcttttaa

SEQ ID NO: 66549 - DNA, 22 bp, Artificial Sequence
  chemically synthesized
tagctcttttaactgtgtaatt

SEQ ID NO: 66550 - DNA, 22 bp, Artificial Sequence
  chemically synthesized
ttttaactgtgtaattacacag

SEQ ID NO: 66551 - DNA, 22 bp, Artificial Sequence
  chemically synthesized
ttaactgtgtaattacacagca

SEQ ID NO: 66552 - DNA, 22 bp, Artificial Sequence
  chemically synthesized
taactgtgtaattacacagcat

SEQ ID NO: 66553 - DNA, 22 bp, Artificial Sequence
  chemically synthesized
aactgtgtaattacacagcatt

SEQ ID NO: 66554 - DNA, 22 bp, Artificial Sequence
  chemically synthesized
actgtgtaattacacagcattt

SEQ ID NO: 66555 - DNA, 22 bp, Artificial Sequence
  chemically synthesized
tgtaattacacagcatttggaa

SEQ ID NO: 66556 - DNA, 22 bp, Artificial Sequence
  chemically synthesized
cacagcatttggaaagtgaatg

SEQ ID NO: 66557 - DNA, 22 bp, Artificial Sequence
  chemically synthesized
ggaaagtgaatgattaacctga

SEQ ID NO: 66558 - DNA, 22 bp, Artificial Sequence
  chemically synthesized
gaaagtgaatgattaacctgat

SEQ ID NO: 66559 - DNA, 22 bp, Artificial Sequence
  chemically synthesized
acctgattgtccataacaacca

SEQ ID NO: 66560 - DNA, 22 bp, Artificial Sequence
  chemically synthesized
attgtccataacaaccattgag

SEQ ID NO: 66561 - DNA, 22 bp, Artificial Sequence
  chemically synthesized
tccataacaaccattgagtaaa

SEQ ID NO: 66562 - DNA, 22 bp, Artificial Sequence
  chemically synthesized
agtaaatacactattacagatt

SEQ ID NO: 66563 - DNA, 22 bp, Artificial Sequence
  chemically synthesized
ttacagattgccaaaatagtac

SEQ ID NO: 66564 - DNA, 22 bp, Artificial Sequence
  chemically synthesized
cagattgccaaaatagtacagt

SEQ ID NO: 66565 - DNA, 22 bp, Artificial Sequence
  chemically synthesized
ccaaaatagtacagtgaagcga

SEQ ID NO: 66566 - DNA, 22 bp, Artificial Sequence
  chemically synthesized
tcaaggggctgtaatcctctcc

SEQ ID NO: 66567 - DNA, 22 bp, Artificial Sequence
  chemically synthesized
caaggggctgtaatcctctcct

SEQ ID NO: 66568 - DNA, 22 bp, Artificial Sequence
  chemically synthesized
aaggggctgtaatcctctcctg

SEQ ID NO: 66569 - DNA, 22 bp, Artificial Sequence
  chemically synthesized
taatcctctcctgggtcaaggc

SEQ ID NO: 66570 - DNA, 22 bp, Artificial Sequence
  chemically synthesized
tcctgggtcaaggctgacccag

SEQ ID NO: 66571 - DNA, 22 bp, Artificial Sequence
  chemically synthesized
ctgggtcaaggctgacccagag

SEQ ID NO: 66572 - DNA, 22 bp, Artificial Sequence
  chemically synthesized
ggtcaaggctgacccagaggct

SEQ ID NO: 66573 - DNA, 22 bp, Artificial Sequence
  chemically synthesized
acccagaggctccttggttagt

SEQ ID NO: 66574 - DNA, 22 bp, Artificial Sequence
  chemically synthesized
cttggttagtgaatcatttact

SEQ ID NO: 66575 - DNA, 22 bp, Artificial Sequence
  chemically synthesized
ggttagtgaatcatttactagg

SEQ ID NO: 66576 - DNA, 22 bp, Artificial Sequence
  chemically synthesized
gttagtgaatcatttactaggg

SEQ ID NO: 66577 - DNA, 22 bp, Artificial Sequence
  chemically synthesized
gtgaatcatttactagggaagg

SEQ ID NO: 66578 - DNA, 22 bp, Artificial Sequence
  chemically synthesized
actagggaaggtttcccctggt

SEQ ID NO: 66579 - DNA, 22 bp, Artificial Sequence
  chemically synthesized
ctagggaaggtttcccctggtc

SEQ ID NO: 66580 - DNA, 22 bp, Artificial Sequence
  chemically synthesized
gggaaggtttcccctggtcact

SEQ ID NO: 66581 - DNA, 22 bp, Artificial Sequence
  chemically synthesized
cccctggtcactgctggctcca

SEQ ID NO: 66582 - DNA, 22 bp, Artificial Sequence
  chemically synthesized
ccctggtcactgctggctccat

SEQ ID NO: 66583 - DNA, 22 bp, Artificial Sequence
  chemically synthesized
gtcactgctggctccatggcct

SEQ ID NO: 66584 - DNA, 22 bp, Artificial Sequence
  chemically synthesized
ctggctccatggcctggtcctt

SEQ ID NO: 66585 - DNA, 22 bp, Artificial Sequence
  chemically synthesized
gctccatggcctggtccttcca

SEQ ID NO: 66586 - DNA, 22 bp, Artificial Sequence
  chemically synthesized
catggcctggtccttccagcca

SEQ ID NO: 66587 - DNA, 22 bp, Artificial Sequence
  chemically synthesized
gtccttccagccaggtcattta

SEQ ID NO: 66588 - DNA, 22 bp, Artificial Sequence
  chemically synthesized
ccagccaggtcatttagaatgg

SEQ ID NO: 66589 - DNA, 22 bp, Artificial Sequence
  chemically synthesized
cagccaggtcatttagaatggc

SEQ ID NO: 66590 - DNA, 22 bp, Artificial Sequence
  chemically synthesized
agaatggctctccaacaggaag

SEQ ID NO: 66591 - DNA, 22 bp, Artificial Sequence
  chemically synthesized
gaatggctctccaacaggaaga

SEQ ID NO: 66592 - DNA, 22 bp, Artificial Sequence
  chemically synthesized
tccaacaggaagaaaagttcac

SEQ ID NO: 66593 - DNA, 22 bp, Artificial Sequence
  chemically synthesized
caacaggaagaaaagttcactg

SEQ ID NO: 66594 - DNA, 22 bp, Artificial Sequence
  chemically synthesized
actgcacagcgcttgaatccta

SEQ ID NO: 66595 - DNA, 22 bp, Artificial Sequence
  chemically synthesized
cacagcgcttgaatcctaatta

SEQ ID NO: 66596 - DNA, 22 bp, Artificial Sequence
  chemically synthesized
gaatcctaattatttattgagg

SEQ ID NO: 66597 - DNA, 22 bp, Artificial Sequence
  chemically synthesized
aatcctaattatttattgaggg

SEQ ID NO: 66598 - DNA, 22 bp, Artificial Sequence
  chemically synthesized
attatttattgaggggctcttc

SEQ ID NO: 66599 - DNA, 22 bp, Artificial Sequence
  chemically synthesized
tttattgaggggctcttctttg

SEQ ID NO: 66600 - DNA, 22 bp, Artificial Sequence
  chemically synthesized
attgaggggctcttctttgccc

SEQ ID NO: 66601 - DNA, 22 bp, Artificial Sequence
  chemically synthesized
ttgaggggctcttctttgccca

SEQ ID NO: 66602 - DNA, 22 bp, Artificial Sequence
  chemically synthesized
aggggctcttctttgcccagca

SEQ ID NO: 66603 - DNA, 22 bp, Artificial Sequence
  chemically synthesized
ttctttgcccagcatggtgctg

SEQ ID NO: 66604 - DNA, 22 bp, Artificial Sequence
  chemically synthesized
ctttgcccagcatggtgctgga

SEQ ID NO: 66605 - DNA, 22 bp, Artificial Sequence
  chemically synthesized
tttgcccagcatggtgctggac

SEQ ID NO: 66606 - DNA, 22 bp, Artificial Sequence
  chemically synthesized
tgcccagcatggtgctggacag

SEQ ID NO: 66607 - DNA, 22 bp, Artificial Sequence
  chemically synthesized
gcccagcatggtgctggacagt

SEQ ID NO: 66608 - DNA, 22 bp, Artificial Sequence
  chemically synthesized
cccagcatggtgctggacagtc

SEQ ID NO: 66609 - DNA, 22 bp, Artificial Sequence
  chemically synthesized
gacagtcagaggtagaccactg

SEQ ID NO: 66610 - DNA, 22 bp, Artificial Sequence
  chemically synthesized
agtcttggttcttagaagcctt

SEQ ID NO: 66611 - DNA, 22 bp, Artificial Sequence
  chemically synthesized
ggttcttagaagccttgaactt

SEQ ID NO: 66612 - DNA, 22 bp, Artificial Sequence
  chemically synthesized
gttcttagaagccttgaacttt

SEQ ID NO: 66613 - DNA, 22 bp, Artificial Sequence
  chemically synthesized
ttagaagccttgaacttttagt

SEQ ID NO: 66614 - DNA, 22 bp, Artificial Sequence
  chemically synthesized
agaagccttgaacttttagttg

SEQ ID NO: 66615 - DNA, 22 bp, Artificial Sequence
  chemically synthesized
gaagccttgaacttttagttgg

SEQ ID NO: 66616 - DNA, 22 bp, Artificial Sequence
  chemically synthesized
gaacttttagttggagaaccag

SEQ ID NO: 66617 - DNA, 22 bp, Artificial Sequence
  chemically synthesized
aacttttagttggagaaccagt

SEQ ID NO: 66618 - DNA, 22 bp, Artificial Sequence
  chemically synthesized
ttagttggagaaccagtggtag

SEQ ID NO: 66619 - DNA, 22 bp, Artificial Sequence
  chemically synthesized
tagttggagaaccagtggtaga

SEQ ID NO: 66620 - DNA, 22 bp, Artificial Sequence
  chemically synthesized
agttggagaaccagtggtagat

SEQ ID NO: 66621 - DNA, 22 bp, Artificial Sequence
  chemically synthesized
gttggagaaccagtggtagata

SEQ ID NO: 66622 - DNA, 22 bp, Artificial Sequence
  chemically synthesized
gagaaccagtggtagatacatg

SEQ ID NO: 66623 - DNA, 22 bp, Artificial Sequence
  chemically synthesized
attacagggagacttggatcca

SEQ ID NO: 66624 - DNA, 22 bp, Artificial Sequence
  chemically synthesized
cagggagacttggatccaggag

SEQ ID NO: 66625 - DNA, 22 bp, Artificial Sequence
  chemically synthesized
ggatccaggagaaatggagtgg

SEQ ID NO: 66626 - DNA, 22 bp, Artificial Sequence
  chemically synthesized
gatccaggagaaatggagtgga

SEQ ID NO: 66627 - DNA, 22 bp, Artificial Sequence
  chemically synthesized
agaagagagacatatcctttac

SEQ ID NO: 66628 - DNA, 22 bp, Artificial Sequence
  chemically synthesized
tacaggcctttgtgttacctag

SEQ ID NO: 66629 - DNA, 22 bp, Artificial Sequence
  chemically synthesized
acaggcctttgtgttacctagc

SEQ ID NO: 66630 - DNA, 22 bp, Artificial Sequence
  chemically synthesized
caggcctttgtgttacctagcc

SEQ ID NO: 66631 - DNA, 22 bp, Artificial Sequence
  chemically synthesized
tgtgttacctagccagtgcctt

SEQ ID NO: 66632 - DNA, 22 bp, Artificial Sequence
  chemically synthesized
gtgttacctagccagtgccttc

SEQ ID NO: 66633 - DNA, 22 bp, Artificial Sequence
  chemically synthesized
tgttacctagccagtgccttca

SEQ ID NO: 66634 - DNA, 22 bp, Artificial Sequence
  chemically synthesized
cctagccagtgccttcatgtcc

SEQ ID NO: 66635 - DNA, 22 bp, Artificial Sequence
  chemically synthesized
gccagtgccttcatgtccccag

SEQ ID NO: 66636 - DNA, 22 bp, Artificial Sequence
  chemically synthesized
catgtccccagccccctggcct

SEQ ID NO: 66637 - DNA, 22 bp, Artificial Sequence
  chemically synthesized
atgtccccagccccctggcctc

SEQ ID NO: 66638 - DNA, 22 bp, Artificial Sequence
  chemically synthesized
gcctccagctcctccaccccca

SEQ ID NO: 66639 - DNA, 22 bp, Artificial Sequence
  chemically synthesized
cagctcctccacccccaccttc

SEQ ID NO: 66640 - DNA, 22 bp, Artificial Sequence
  chemically synthesized
ctccacccccaccttcccccct

SEQ ID NO: 66641 - DNA, 22 bp, Artificial Sequence
  chemically synthesized
cacccccaccttcccccctcct

SEQ ID NO: 66642 - DNA, 22 bp, Artificial Sequence
  chemically synthesized
cccccctcctcgctgtccttgg

SEQ ID NO: 66643 - DNA, 22 bp, Artificial Sequence
  chemically synthesized
ccccctcctcgctgtccttggt

SEQ ID NO: 66644 - DNA, 22 bp, Artificial Sequence
  chemically synthesized
ctcgctgtccttggtgcagagt

SEQ ID NO: 66645 - DNA, 22 bp, Artificial Sequence
  chemically synthesized
gctgtccttggtgcagagtggg

SEQ ID NO: 66646 - DNA, 22 bp, Artificial Sequence
  chemically synthesized
tccttggtgcagagtggggcag

SEQ ID NO: 66647 - DNA, 22 bp, Artificial Sequence
  chemically synthesized
ggtgcagagtggggcagtcatc

SEQ ID NO: 66648 - DNA, 22 bp, Artificial Sequence
  chemically synthesized
gtgcagagtggggcagtcatct

SEQ ID NO: 66649 - DNA, 22 bp, Artificial Sequence
  chemically synthesized
agtggggcctcctcccggggaa

SEQ ID NO: 66650 - DNA, 22 bp, Artificial Sequence
  chemically synthesized
ctcccggggaagtccacagctt

SEQ ID NO: 66651 - DNA, 22 bp, Artificial Sequence
  chemically synthesized
ccggggaagtccacagcttgct

SEQ ID NO: 66652 - DNA, 22 bp, Artificial Sequence
  chemically synthesized
gctccacaccggaggagccgcc

SEQ ID NO: 66653 - DNA, 22 bp, Artificial Sequence
  chemically synthesized
ctccacaccggaggagccgcca

SEQ ID NO: 66654 - DNA, 22 bp, Artificial Sequence
  chemically synthesized
cacaccggaggagccgccaaag

SEQ ID NO: 66655 - DNA, 22 bp, Artificial Sequence
  chemically synthesized
aacaaaagcagcttttgagtga

SEQ ID NO: 66656 - DNA, 22 bp, Artificial Sequence
  chemically synthesized
acaaaagcagcttttgagtgag

SEQ ID NO: 66657 - DNA, 22 bp, Artificial Sequence
  chemically synthesized
ttgagtgagaaagctgagtgga

SEQ ID NO: 66658 - DNA, 22 bp, Artificial Sequence
  chemically synthesized
tgagtgagaaagctgagtggag

SEQ ID NO: 66659 - DNA, 22 bp, Artificial Sequence
  chemically synthesized
gagtgagaaagctgagtggagt

SEQ ID NO: 66660 - DNA, 22 bp, Artificial Sequence
  chemically synthesized
agtgagaaagctgagtggagtt

SEQ ID NO: 66661 - DNA, 22 bp, Artificial Sequence
  chemically synthesized
agtggagttgtcccaacctgtc

SEQ ID NO: 66662 - DNA, 22 bp, Artificial Sequence
  chemically synthesized
tcccaacctgtcaacttcagat

SEQ ID NO: 66663 - DNA, 22 bp, Artificial Sequence
  chemically synthesized
tcaacttcagatttctttcctc

SEQ ID NO: 66664 - DNA, 22 bp, Artificial Sequence
  chemically synthesized
cagatttctttcctcctcccca

SEQ ID NO: 66665 - DNA, 22 bp, Artificial Sequence
  chemically synthesized
agatttctttcctcctccccat

SEQ ID NO: 66666 - DNA, 22 bp, Artificial Sequence
  chemically synthesized
ctttcctcctccccataaatca

SEQ ID NO: 66667 - DNA, 22 bp, Artificial Sequence
  chemically synthesized
tttcctcctccccataaatcaa

SEQ ID NO: 66668 - DNA, 22 bp, Artificial Sequence
  chemically synthesized
tcctcctccccataaatcaaaa

SEQ ID NO: 66669 - DNA, 22 bp, Artificial Sequence
  chemically synthesized
cctcctccccataaatcaaaaa

SEQ ID NO: 66670 - DNA, 22 bp, Artificial Sequence
  chemically synthesized
ctcctccccataaatcaaaaaa

SEQ ID NO: 66671 - DNA, 22 bp, Artificial Sequence
  chemically synthesized
ctccccataaatcaaaaaacgg

SEQ ID NO: 66672 - DNA, 22 bp, Artificial Sequence
  chemically synthesized
cccataaatcaaaaaacggttg

SEQ ID NO: 66673 - DNA, 22 bp, Artificial Sequence
  chemically synthesized
gtggaagggagggacagaagcg

SEQ ID NO: 66674 - DNA, 22 bp, Artificial Sequence
  chemically synthesized
cattttcagattttgtaagaaa

SEQ ID NO: 66675 - DNA, 22 bp, Artificial Sequence
  chemically synthesized
attttcagattttgtaagaaaa

SEQ ID NO: 66676 - DNA, 22 bp, Artificial Sequence
  chemically synthesized
tcagattttgtaagaaaataaa

SEQ ID NO: 66677 - DNA, 22 bp, Artificial Sequence
  chemically synthesized
cagattttgtaagaaaataaaa

SEQ ID NO: 66678 - DNA, 22 bp, Artificial Sequence
  chemically synthesized
agattttgtaagaaaataaaat

SEQ ID NO: 66679 - DNA, 22 bp, Artificial Sequence
  chemically synthesized
tgtaagaaaataaaataaaatc

SEQ ID NO: 66680 - DNA, 22 bp, Artificial Sequence
  chemically synthesized
gtaagaaaataaaataaaatca

SEQ ID NO: 66681 - DNA, 22 bp, Artificial Sequence
  chemically synthesized
taagaaaataaaataaaatcaa

SEQ ID NO: 66682 - DNA, 22 bp, Artificial Sequence
  chemically synthesized
tcccacgctgataccttacatg

SEQ ID NO: 66683 - DNA, 22 bp, Artificial Sequence
  chemically synthesized
ataccttacatgccaggtttga

SEQ ID NO: 66684 - DNA, 22 bp, Artificial Sequence
  chemically synthesized
acatgccaggtttgagcctgag

SEQ ID NO: 66685 - DNA, 22 bp, Artificial Sequence
  chemically synthesized
catgccaggtttgagcctgagg

SEQ ID NO: 66686 - DNA, 22 bp, Artificial Sequence
  chemically synthesized
gagcctgaggcaaatttttgtg

SEQ ID NO: 66687 - DNA, 22 bp, Artificial Sequence
  chemically synthesized
agcctgaggcaaatttttgtgg

SEQ ID NO: 66688 - DNA, 22 bp, Artificial Sequence
  chemically synthesized
aggcaaatttttgtggccatgt

SEQ ID NO: 66689 - DNA, 22 bp, Artificial Sequence
  chemically synthesized
ttgtggccatgtaataagcctc

SEQ ID NO: 66690 - DNA, 22 bp, Artificial Sequence
  chemically synthesized
tgtggccatgtaataagcctct

SEQ ID NO: 66691 - DNA, 22 bp, Artificial Sequence
  chemically synthesized
gtggccatgtaataagcctctt

SEQ ID NO: 66692 - DNA, 22 bp, Artificial Sequence
  chemically synthesized
tggccatgtaataagcctcttt

SEQ ID NO: 66693 - DNA, 22 bp, Artificial Sequence
  chemically synthesized
tttaaaatggtgacagaccctt

SEQ ID NO: 66694 - DNA, 22 bp, Artificial Sequence
  chemically synthesized
taaaatggtgacagacccttga

SEQ ID NO: 66695 - DNA, 22 bp, Artificial Sequence
  chemically synthesized
aaaatggtgacagacccttgac

SEQ ID NO: 66696 - DNA, 22 bp, Artificial Sequence
  chemically synthesized
aaatggtgacagacccttgact

SEQ ID NO: 66697 - DNA, 22 bp, Artificial Sequence
  chemically synthesized
gactctttgccttgaattacat

SEQ ID NO: 66698 - DNA, 22 bp, Artificial Sequence
  chemically synthesized
actctttgccttgaattacatt

SEQ ID NO: 66699 - DNA, 22 bp, Artificial Sequence
  chemically synthesized
tttgccttgaattacattgata

SEQ ID NO: 66700 - DNA, 22 bp, Artificial Sequence
  chemically synthesized
tgccttgaattacattgataaa

SEQ ID NO: 66701 - DNA, 22 bp, Artificial Sequence
  chemically synthesized
gccttgaattacattgataaaa

SEQ ID NO: 66702 - DNA, 22 bp, Artificial Sequence
  chemically synthesized
ccttgaattacattgataaaag

SEQ ID NO: 66703 - DNA, 22 bp, Artificial Sequence
  chemically synthesized
gaattacattgataaaagacat

SEQ ID NO: 66704 - DNA, 22 bp, Artificial Sequence
  chemically synthesized
aattacattgataaaagacatt

SEQ ID NO: 66705 - DNA, 22 bp, Artificial Sequence
  chemically synthesized
cattgataaaagacattttatt

SEQ ID NO: 66706 - DNA, 22 bp, Artificial Sequence
  chemically synthesized
ataaaagacattttattgcatt

SEQ ID NO: 66707 - DNA, 22 bp, Artificial Sequence
  chemically synthesized
tattgcattagagctggggcag

SEQ ID NO: 66708 - DNA, 22 bp, Artificial Sequence
  chemically synthesized
attgcattagagctggggcagg

SEQ ID NO: 66709 - DNA, 22 bp, Artificial Sequence
  chemically synthesized
ttgcattagagctggggcagga

SEQ ID NO: 66710 - DNA, 22 bp, Artificial Sequence
  chemically synthesized
cattagagctggggcaggagta

SEQ ID NO: 66711 - DNA, 22 bp, Artificial Sequence
  chemically synthesized
gagctggggcaggagtacagga

SEQ ID NO: 66712 - DNA, 22 bp, Artificial Sequence
  chemically synthesized
gggcaggagtacaggacggttc

SEQ ID NO: 66713 - DNA, 22 bp, Artificial Sequence
  chemically synthesized
ttgcctggtcggcctctttgaa

SEQ ID NO: 66714 - DNA, 22 bp, Artificial Sequence
  chemically synthesized
gcctggtcggcctctttgaaac

SEQ ID NO: 66715 - DNA, 22 bp, Artificial Sequence
  chemically synthesized
cctggtcggcctctttgaaacc

SEQ ID NO: 66716 - DNA, 22 bp, Artificial Sequence
  chemically synthesized
gtcggcctctttgaaaccgcgt

SEQ ID NO: 66717 - DNA, 22 bp, Artificial Sequence
  chemically synthesized
tttgaaaccgcgtcagcctgcc

SEQ ID NO: 66718 - DNA, 22 bp, Artificial Sequence
  chemically synthesized
tgaaaccgcgtcagcctgccgt

SEQ ID NO: 66719 - DNA, 22 bp, Artificial Sequence
  chemically synthesized
gaaaccgcgtcagcctgccgtc

SEQ ID NO: 66720 - DNA, 22 bp, Artificial Sequence
  chemically synthesized
aaaccgcgtcagcctgccgtcc

SEQ ID NO: 66721 - DNA, 22 bp, Artificial Sequence
  chemically synthesized
ccgtccacactctccaccgcct

SEQ ID NO: 66722 - DNA, 22 bp, Artificial Sequence
  chemically synthesized
tccaccgcctgacagggtttga

SEQ ID NO: 66723 - DNA, 22 bp, Artificial Sequence
  chemically synthesized
caccgcctgacagggtttgagt

SEQ ID NO: 66724 - DNA, 22 bp, Artificial Sequence
  chemically synthesized
acagggtttgagtgcgatggca

SEQ ID NO: 66725 - DNA, 22 bp, Artificial Sequence
  chemically synthesized
gagtgcgatggcagctgagatc

SEQ ID NO: 66726 - DNA, 22 bp, Artificial Sequence
  chemically synthesized
agtgcgatggcagctgagatct

SEQ ID NO: 66727 - DNA, 22 bp, Artificial Sequence
  chemically synthesized
agatctgtgggccggtgacaga

SEQ ID NO: 66728 - DNA, 22 bp, Artificial Sequence
  chemically synthesized
tgggccggtgacagagggggct

SEQ ID NO: 66729 - DNA, 22 bp, Artificial Sequence
  chemically synthesized
tctacccagcagtagaaggttg

SEQ ID NO: 66730 - DNA, 22 bp, Artificial Sequence
  chemically synthesized
ctacccagcagtagaaggttga

SEQ ID NO: 66731 - DNA, 22 bp, Artificial Sequence
  chemically synthesized
tacccagcagtagaaggttgag

SEQ ID NO: 66732 - DNA, 22 bp, Artificial Sequence
  chemically synthesized
cccagcagtagaaggttgaggc

SEQ ID NO: 66733 - DNA, 22 bp, Artificial Sequence
  chemically synthesized
aggccctggaagcaaaaggatt

SEQ ID NO: 66734 - DNA, 22 bp, Artificial Sequence
  chemically synthesized
gaagcaaaaggatttcagcctg

SEQ ID NO: 66735 - DNA, 22 bp, Artificial Sequence
  chemically synthesized
cagcctgaggggcttgttaagg

SEQ ID NO: 66736 - DNA, 22 bp, Artificial Sequence
  chemically synthesized
agcctgaggggcttgttaaggg

SEQ ID NO: 66737 - DNA, 22 bp, Artificial Sequence
  chemically synthesized
aggggcttgttaagggagagtt

SEQ ID NO: 66738 - DNA, 22 bp, Artificial Sequence
  chemically synthesized
gttaagggagagttattctttc

SEQ ID NO: 66739 - DNA, 22 bp, Artificial Sequence
  chemically synthesized
ttaagggagagttattctttcc

SEQ ID NO: 66740 - DNA, 22 bp, Artificial Sequence
  chemically synthesized
agggagagttattctttcctgt

SEQ ID NO: 66741 - DNA, 22 bp, Artificial Sequence
  chemically synthesized
ttctttcctgttcctagtagac

SEQ ID NO: 66742 - DNA, 22 bp, Artificial Sequence
  chemically synthesized
tttcctgttcctagtagacctg

SEQ ID NO: 66743 - DNA, 22 bp, Artificial Sequence
  chemically synthesized
tcctgttcctagtagacctgag

SEQ ID NO: 66744 - DNA, 22 bp, Artificial Sequence
  chemically synthesized
cctgttcctagtagacctgaga

SEQ ID NO: 66745 - DNA, 22 bp, Artificial Sequence
  chemically synthesized
ctgttcctagtagacctgagag

SEQ ID NO: 66746 - DNA, 22 bp, Artificial Sequence
  chemically synthesized
ttcctagtagacctgagagagc

SEQ ID NO: 66747 - DNA, 22 bp, Artificial Sequence
  chemically synthesized
ctagtagacctgagagagcttg

SEQ ID NO: 66748 - DNA, 22 bp, Artificial Sequence
  chemically synthesized
gtagacctgagagagcttgacg

SEQ ID NO: 66749 - DNA, 22 bp, Artificial Sequence
  chemically synthesized
agagagcttgacgttggtggcc

SEQ ID NO: 66750 - DNA, 22 bp, Artificial Sequence
  chemically synthesized
gacgttggtggcctctggtcag

SEQ ID NO: 66751 - DNA, 22 bp, Artificial Sequence
  chemically synthesized
acgttggtggcctctggtcagc

SEQ ID NO: 66752 - DNA, 22 bp, Artificial Sequence
  chemically synthesized
gtggcctctggtcagcctcatg

SEQ ID NO: 66753 - DNA, 22 bp, Artificial Sequence
  chemically synthesized
tggtcagcctcatggttgggac

SEQ ID NO: 66754 - DNA, 22 bp, Artificial Sequence
  chemically synthesized
gtcagcctcatggttgggactg

SEQ ID NO: 66755 - DNA, 22 bp, Artificial Sequence
  chemically synthesized
atggttgggactgcgtggaaat

SEQ ID NO: 66756 - DNA, 22 bp, Artificial Sequence
  chemically synthesized
ggactgcgtggaaatgctagac

SEQ ID NO: 66757 - DNA, 22 bp, Artificial Sequence
  chemically synthesized
cgtggaaatgctagacctgaga

SEQ ID NO: 66758 - DNA, 22 bp, Artificial Sequence
  chemically synthesized
gacctgagagacctcatttccc

SEQ ID NO: 66759 - DNA, 22 bp, Artificial Sequence
  chemically synthesized
agagacctcatttcccaagcag

SEQ ID NO: 66760 - DNA, 22 bp, Artificial Sequence
  chemically synthesized
atttcccaagcagtcttagaga

SEQ ID NO: 66761 - DNA, 22 bp, Artificial Sequence
  chemically synthesized
cccaagcagtcttagagagact

SEQ ID NO: 66762 - DNA, 22 bp, Artificial Sequence
  chemically synthesized
ccaagcagtcttagagagactc

SEQ ID NO: 66763 - DNA, 22 bp, Artificial Sequence
  chemically synthesized
agagagactcaaaacaaaaaat

SEQ ID NO: 66764 - DNA, 22 bp, Artificial Sequence
  chemically synthesized
gagagactcaaaacaaaaaatg

SEQ ID NO: 66765 - DNA, 22 bp, Artificial Sequence
  chemically synthesized
aaaacaaaaaatggtctccggg

SEQ ID NO: 66766 - DNA, 22 bp, Artificial Sequence
  chemically synthesized
cgggtcccaccgtggtgtgtgg

SEQ ID NO: 66767 - DNA, 22 bp, Artificial Sequence
  chemically synthesized
tgcccgcagaggccaggtgtcc

SEQ ID NO: 66768 - DNA, 22 bp, Artificial Sequence
  chemically synthesized
agtccccacgtggacctgctag

SEQ ID NO: 66769 - DNA, 22 bp, Artificial Sequence
  chemically synthesized
ctaggtgggtagaaaggagttg

SEQ ID NO: 66770 - DNA, 22 bp, Artificial Sequence
  chemically synthesized
ggtgggtagaaaggagttgaag

SEQ ID NO: 66771 - DNA, 22 bp, Artificial Sequence
  chemically synthesized
aagatgttgtgctgttggttgg

SEQ ID NO: 66772 - DNA, 22 bp, Artificial Sequence
  chemically synthesized
tgctgttggttggaggagcttg

SEQ ID NO: 66773 - DNA, 22 bp, Artificial Sequence
  chemically synthesized
ttggttggaggagcttggaggt

SEQ ID NO: 66774 - DNA, 22 bp, Artificial Sequence
  chemically synthesized
gttggaggagcttggaggtgtc

SEQ ID NO: 66775 - DNA, 22 bp, Artificial Sequence
  chemically synthesized
gaggagcttggaggtgtctggg

SEQ ID NO: 66776 - DNA, 22 bp, Artificial Sequence
  chemically synthesized
ggaggtgtctgggaacattgga

SEQ ID NO: 66777 - DNA, 22 bp, Artificial Sequence
  chemically synthesized
gaggtgtctgggaacattggat

SEQ ID NO: 66778 - DNA, 22 bp, Artificial Sequence
  chemically synthesized
ggaacattggatgttactcata

SEQ ID NO: 66779 - DNA, 22 bp, Artificial Sequence
  chemically synthesized
gatgttactcatatggaatcag

SEQ ID NO: 66780 - DNA, 22 bp, Artificial Sequence
  chemically synthesized
ctcatatggaatcagcagaatt

SEQ ID NO: 66781 - DNA, 22 bp, Artificial Sequence
  chemically synthesized
atatggaatcagcagaattagt

SEQ ID NO: 66782 - DNA, 22 bp, Artificial Sequence
  chemically synthesized
gtagagccaagaacagacggca

SEQ ID NO: 66783 - DNA, 22 bp, Artificial Sequence
  chemically synthesized
gactgaggctgctccaatgatg

SEQ ID NO: 66784 - DNA, 22 bp, Artificial Sequence
  chemically synthesized
aggctgctccaatgatggcagg

SEQ ID NO: 66785 - DNA, 22 bp, Artificial Sequence
  chemically synthesized
ctccaatgatggcaggttgtat

SEQ ID NO: 66786 - DNA, 22 bp, Artificial Sequence
  chemically synthesized
caatgatggcaggttgtatctg

SEQ ID NO: 66787 - DNA, 22 bp, Artificial Sequence
  chemically synthesized
tatctgcgggcatctccaattt

SEQ ID NO: 66788 - DNA, 22 bp, Artificial Sequence
  chemically synthesized
cgggcatctccaatttgctcag

SEQ ID NO: 66789 - DNA, 22 bp, Artificial Sequence
  chemically synthesized
caatttgctcagggaactcttt

SEQ ID NO: 66790 - DNA, 22 bp, Artificial Sequence
  chemically synthesized
gctcagggaactctttccagat

SEQ ID NO: 66791 - DNA, 22 bp, Artificial Sequence
  chemically synthesized
ctcagggaactctttccagatt

SEQ ID NO: 66792 - DNA, 22 bp, Artificial Sequence
  chemically synthesized
agggaactctttccagattggt

SEQ ID NO: 66793 - DNA, 22 bp, Artificial Sequence
  chemically synthesized
tttccagattggtcagtggtat

SEQ ID NO: 66794 - DNA, 22 bp, Artificial Sequence
  chemically synthesized
tccagattggtcagtggtataa

SEQ ID NO: 66795 - DNA, 22 bp, Artificial Sequence
  chemically synthesized
ccagattggtcagtggtataaa

SEQ ID NO: 66796 - DNA, 22 bp, Artificial Sequence
  chemically synthesized
cagattggtcagtggtataaat

SEQ ID NO: 66797 - DNA, 22 bp, Artificial Sequence
  chemically synthesized
gtcagtggtataaatgaaggat

SEQ ID NO: 66798 - DNA, 22 bp, Artificial Sequence
  chemically synthesized
ggaaattgggtaaaaagccagg

SEQ ID NO: 66799 - DNA, 22 bp, Artificial Sequence
  chemically synthesized
ggtaaaaagccagggaggaggg

SEQ ID NO: 66800 - DNA, 22 bp, Artificial Sequence
  chemically synthesized
tgttttgttctgtgggactttg

SEQ ID NO: 66801 - DNA, 22 bp, Artificial Sequence
  chemically synthesized
tgttctgtgggactttgccaga

SEQ ID NO: 66802 - DNA, 22 bp, Artificial Sequence
  chemically synthesized
gttctgtgggactttgccagag

SEQ ID NO: 66803 - DNA, 22 bp, Artificial Sequence
  chemically synthesized
ttctgtgggactttgccagaga

SEQ ID NO: 66804 - DNA, 22 bp, Artificial Sequence
  chemically synthesized
tgtgggactttgccagagagat

SEQ ID NO: 66805 - DNA, 22 bp, Artificial Sequence
  chemically synthesized
tgggactttgccagagagatga

SEQ ID NO: 66806 - DNA, 22 bp, Artificial Sequence
  chemically synthesized
tgccagagagatgaggactgag

SEQ ID NO: 66807 - DNA, 22 bp, Artificial Sequence
  chemically synthesized
gccagagagatgaggactgagg

SEQ ID NO: 66808 - DNA, 22 bp, Artificial Sequence
  chemically synthesized
ccagagagatgaggactgaggc

SEQ ID NO: 66809 - DNA, 22 bp, Artificial Sequence
  chemically synthesized
aggctgggctgctgtgtgcctg

SEQ ID NO: 66810 - DNA, 22 bp, Artificial Sequence
  chemically synthesized
ggctgctgtgtgcctgggaggc

SEQ ID NO: 66811 - DNA, 22 bp, Artificial Sequence
  chemically synthesized
ctgtgtgcctgggaggcgggaa

SEQ ID NO: 66812 - DNA, 22 bp, Artificial Sequence
  chemically synthesized
tgtgcctgggaggcgggaaggt

SEQ ID NO: 66813 - DNA, 22 bp, Artificial Sequence
  chemically synthesized
ggaggcgggaaggtgctgaggc

SEQ ID NO: 66814 - DNA, 22 bp, Artificial Sequence
  chemically synthesized
aggcactgcagagaagcagctg

SEQ ID NO: 66815 - DNA, 22 bp, Artificial Sequence
  chemically synthesized
cagagaagcagctgcagcatgc

SEQ ID NO: 66816 - DNA, 22 bp, Artificial Sequence
  chemically synthesized
cagcatgccccgggcagaggcc

SEQ ID NO: 66817 - DNA, 22 bp, Artificial Sequence
  chemically synthesized
ttttctgaaagaaggacttgcc

SEQ ID NO: 66818 - DNA, 22 bp, Artificial Sequence
  chemically synthesized
tctgaaagaaggacttgccgtc

SEQ ID NO: 66819 - DNA, 22 bp, Artificial Sequence
  chemically synthesized
ctgaaagaaggacttgccgtca

SEQ ID NO: 66820 - DNA, 22 bp, Artificial Sequence
  chemically synthesized
tgaaagaaggacttgccgtcat

SEQ ID NO: 66821 - DNA, 22 bp, Artificial Sequence
  chemically synthesized
aaagaaggacttgccgtcatgg

SEQ ID NO: 66822 - DNA, 22 bp, Artificial Sequence
  chemically synthesized
gccgtcatgggaggaggcctgg

SEQ ID NO: 66823 - DNA, 22 bp, Artificial Sequence
  chemically synthesized
ccgtcatgggaggaggcctggc

SEQ ID NO: 66824 - DNA, 22 bp, Artificial Sequence
  chemically synthesized
gcctcgcagcaccagagcgctc

SEQ ID NO: 66825 - DNA, 22 bp, Artificial Sequence
  chemically synthesized
gcagcaccagagcgctccttca

SEQ ID NO: 66826 - DNA, 22 bp, Artificial Sequence
  chemically synthesized
cttcattcagcctcacctcagg

SEQ ID NO: 66827 - DNA, 22 bp, Artificial Sequence
  chemically synthesized
cattcagcctcacctcaggcga

SEQ ID NO: 66828 - DNA, 22 bp, Artificial Sequence
  chemically synthesized
attcagcctcacctcaggcgag

SEQ ID NO: 66829 - DNA, 22 bp, Artificial Sequence
  chemically synthesized
agcctcacctcaggcgagaggg

SEQ ID NO: 66830 - DNA, 22 bp, Artificial Sequence
  chemically synthesized
acctcaggcgagagggcagcct

SEQ ID NO: 66831 - DNA, 22 bp, Artificial Sequence
  chemically synthesized
aggcgagagggcagcctagttt

SEQ ID NO: 66832 - DNA, 22 bp, Artificial Sequence
  chemically synthesized
gttttattcctgaagaaatgtt

SEQ ID NO: 66833 - DNA, 22 bp, Artificial Sequence
  chemically synthesized
tattcctgaagaaatgttagag

SEQ ID NO: 66834 - DNA, 22 bp, Artificial Sequence
  chemically synthesized
attcctgaagaaatgttagagc

SEQ ID NO: 66835 - DNA, 22 bp, Artificial Sequence
  chemically synthesized
ttcctgaagaaatgttagagcc

SEQ ID NO: 66836 - DNA, 22 bp, Artificial Sequence
  chemically synthesized
ctgaagaaatgttagagcctga

SEQ ID NO: 66837 - DNA, 22 bp, Artificial Sequence
  chemically synthesized
aagaaatgttagagcctgacct

SEQ ID NO: 66838 - DNA, 22 bp, Artificial Sequence
  chemically synthesized
gagcctgacctgctagaccatt

SEQ ID NO: 66839 - DNA, 22 bp, Artificial Sequence
  chemically synthesized
acctgctagaccattttttttg

SEQ ID NO: 66840 - DNA, 22 bp, Artificial Sequence
  chemically synthesized
ctagaccattttttttggtaga

SEQ ID NO: 66841 - DNA, 22 bp, Artificial Sequence
  chemically synthesized
gaccattttttttggtagagct

SEQ ID NO: 66842 - DNA, 22 bp, Artificial Sequence
  chemically synthesized
tttttggtagagctttgaagcc

SEQ ID NO: 66843 - DNA, 22 bp, Artificial Sequence
  chemically synthesized
ttttggtagagctttgaagcct

SEQ ID NO: 66844 - DNA, 22 bp, Artificial Sequence
  chemically synthesized
tttggtagagctttgaagcctt

SEQ ID NO: 66845 - DNA, 22 bp, Artificial Sequence
  chemically synthesized
ttggtagagctttgaagcctta

SEQ ID NO: 66846 - DNA, 22 bp, Artificial Sequence
  chemically synthesized
tggtagagctttgaagccttaa

SEQ ID NO: 66847 - DNA, 22 bp, Artificial Sequence
  chemically synthesized
ggtagagctttgaagccttaaa

SEQ ID NO: 66848 - DNA, 22 bp, Artificial Sequence
  chemically synthesized
gtagagctttgaagccttaaat

SEQ ID NO: 66849 - DNA, 22 bp, Artificial Sequence
  chemically synthesized
tgaagccttaaattagttctca

SEQ ID NO: 66850 - DNA, 22 bp, Artificial Sequence
  chemically synthesized
gaagccttaaattagttctcat

SEQ ID NO: 66851 - DNA, 22 bp, Artificial Sequence
  chemically synthesized
aagccttaaattagttctcata

SEQ ID NO: 66852 - DNA, 22 bp, Artificial Sequence
  chemically synthesized
aaattagttctcataatttctg

SEQ ID NO: 66853 - DNA, 22 bp, Artificial Sequence
  chemically synthesized
aattagttctcataatttctga

SEQ ID NO: 66854 - DNA, 22 bp, Artificial Sequence
  chemically synthesized
gttctcataatttctgagcagc

SEQ ID NO: 66855 - DNA, 22 bp, Artificial Sequence
  chemically synthesized
tcataatttctgagcagctctg

SEQ ID NO: 66856 - DNA, 22 bp, Artificial Sequence
  chemically synthesized
ataatttctgagcagctctgtg

SEQ ID NO: 66857 - DNA, 22 bp, Artificial Sequence
  chemically synthesized
ctgagcagctctgtgttaacca

SEQ ID NO: 66858 - DNA, 22 bp, Artificial Sequence
  chemically synthesized
tgagcagctctgtgttaaccat

SEQ ID NO: 66859 - DNA, 22 bp, Artificial Sequence
  chemically synthesized
agcagctctgtgttaaccatag

SEQ ID NO: 66860 - DNA, 22 bp, Artificial Sequence
  chemically synthesized
tgtgttaaccataggacataat

SEQ ID NO: 66861 - DNA, 22 bp, Artificial Sequence
  chemically synthesized
tgttaaccataggacataatag

SEQ ID NO: 66862 - DNA, 22 bp, Artificial Sequence
  chemically synthesized
accataggacataataggtttt

SEQ ID NO: 66863 - DNA, 22 bp, Artificial Sequence
  chemically synthesized
taattctggagaatggccagtt

SEQ ID NO: 66864 - DNA, 22 bp, Artificial Sequence
  chemically synthesized
aattctggagaatggccagttc

SEQ ID NO: 66865 - DNA, 22 bp, Artificial Sequence
  chemically synthesized
attctggagaatggccagttct

SEQ ID NO: 66866 - DNA, 22 bp, Artificial Sequence
  chemically synthesized
tggagaatggccagttctggtt

SEQ ID NO: 66867 - DNA, 22 bp, Artificial Sequence
  chemically synthesized
gagaatggccagttctggttct

SEQ ID NO: 66868 - DNA, 22 bp, Artificial Sequence
  chemically synthesized
tggttctcagaatctcttggcc

SEQ ID NO: 66869 - DNA, 22 bp, Artificial Sequence
  chemically synthesized
gttctcagaatctcttggccaa

SEQ ID NO: 66870 - DNA, 22 bp, Artificial Sequence
  chemically synthesized
tcagaatctcttggccaagact

SEQ ID NO: 66871 - DNA, 22 bp, Artificial Sequence
  chemically synthesized
agaatctcttggccaagactgt

SEQ ID NO: 66872 - DNA, 22 bp, Artificial Sequence
  chemically synthesized
ttggccaagactgtcacagagt

SEQ ID NO: 66873 - DNA, 22 bp, Artificial Sequence
  chemically synthesized
ggccaagactgtcacagagtat

SEQ ID NO: 66874 - DNA, 22 bp, Artificial Sequence
  chemically synthesized
gccaagactgtcacagagtatt

SEQ ID NO: 66875 - DNA, 22 bp, Artificial Sequence
  chemically synthesized
tcacagagtattaggcctgtga

SEQ ID NO: 66876 - DNA, 22 bp, Artificial Sequence
  chemically synthesized
ggcctgtgaagtgccttccacg

SEQ ID NO: 66877 - DNA, 22 bp, Artificial Sequence
  chemically synthesized
tgaagtgccttccacgcttccc

SEQ ID NO: 66878 - DNA, 22 bp, Artificial Sequence
  chemically synthesized
ccacgcttcccctgaagtccac

SEQ ID NO: 66879 - DNA, 22 bp, Artificial Sequence
  chemically synthesized
cacgcttcccctgaagtccaca

SEQ ID NO: 66880 - DNA, 22 bp, Artificial Sequence
  chemically synthesized
cccctgaagtccacacaccagt

SEQ ID NO: 66881 - DNA, 22 bp, Artificial Sequence
  chemically synthesized
ccctgaagtccacacaccagtc

SEQ ID NO: 66882 - DNA, 22 bp, Artificial Sequence
  chemically synthesized
aagtccacacaccagtcactca

SEQ ID NO: 66883 - DNA, 22 bp, Artificial Sequence
  chemically synthesized
aatagtgccagaaaggcaagtg

SEQ ID NO: 66884 - DNA, 22 bp, Artificial Sequence
  chemically synthesized
cctgaaaggggctgtatgacca

SEQ ID NO: 66885 - DNA, 22 bp, Artificial Sequence
  chemically synthesized
aaaggggctgtatgaccagtgt

SEQ ID NO: 66886 - DNA, 22 bp, Artificial Sequence
  chemically synthesized
tatgaccagtgtccagacgaca

SEQ ID NO: 66887 - DNA, 22 bp, Artificial Sequence
  chemically synthesized
ctgccgcggccctgaggtggca

SEQ ID NO: 66888 - DNA, 22 bp, Artificial Sequence
  chemically synthesized
tgccgcggccctgaggtggcag

SEQ ID NO: 66889 - DNA, 22 bp, Artificial Sequence
  chemically synthesized
ccgcggccctgaggtggcagtg

SEQ ID NO: 66890 - DNA, 22 bp, Artificial Sequence
  chemically synthesized
aggtggcagtgggaggggtttg

SEQ ID NO: 66891 - DNA, 22 bp, Artificial Sequence
  chemically synthesized
gtcagaaggtgggcagggtcct

SEQ ID NO: 66892 - DNA, 22 bp, Artificial Sequence
  chemically synthesized
tcagaaggtgggcagggtcctg

SEQ ID NO: 66893 - DNA, 22 bp, Artificial Sequence
  chemically synthesized
aagcccagccctgtcctccctg

SEQ ID NO: 66894 - DNA, 22 bp, Artificial Sequence
  chemically synthesized
tcctccctgtccacagcaggac

SEQ ID NO: 66895 - DNA, 22 bp, Artificial Sequence
  chemically synthesized
cctgtccacagcaggacacttc

SEQ ID NO: 66896 - DNA, 22 bp, Artificial Sequence
  chemically synthesized
tccacagcaggacacttctgag

SEQ ID NO: 66897 - DNA, 22 bp, Artificial Sequence
  chemically synthesized
ctgagatcttcgagttcctcac

SEQ ID NO: 66898 - DNA, 22 bp, Artificial Sequence
  chemically synthesized
tgagatcttcgagttcctcact

SEQ ID NO: 66899 - DNA, 22 bp, Artificial Sequence
  chemically synthesized
agatcttcgagttcctcactgg

SEQ ID NO: 66900 - DNA, 22 bp, Artificial Sequence
  chemically synthesized
cgagttcctcactgggaggtga

SEQ ID NO: 66901 - DNA, 22 bp, Artificial Sequence
  chemically synthesized
gagttcctcactgggaggtgag

SEQ ID NO: 66902 - DNA, 22 bp, Artificial Sequence
  chemically synthesized
ctcactgggaggtgaggctaat

SEQ ID NO: 66903 - DNA, 22 bp, Artificial Sequence
  chemically synthesized
actgggaggtgaggctaatacc

SEQ ID NO: 66904 - DNA, 22 bp, Artificial Sequence
  chemically synthesized
ggaggtgaggctaataccttcc

SEQ ID NO: 66905 - DNA, 22 bp, Artificial Sequence
  chemically synthesized
ataccttccctcattccacagg

SEQ ID NO: 66906 - DNA, 22 bp, Artificial Sequence
  chemically synthesized
ccctcattccacagggcgactg

SEQ ID NO: 66907 - DNA, 22 bp, Artificial Sequence
  chemically synthesized
cctcattccacagggcgactgt

SEQ ID NO: 66908 - DNA, 22 bp, Artificial Sequence
  chemically synthesized
attccacagggcgactgttggg

SEQ ID NO: 66909 - DNA, 22 bp, Artificial Sequence
  chemically synthesized
cacagggcgactgttggggcag

SEQ ID NO: 66910 - DNA, 22 bp, Artificial Sequence
  chemically synthesized
ttggggcaggatgtgaggagag

SEQ ID NO: 66911 - DNA, 22 bp, Artificial Sequence
  chemically synthesized
gggcaggatgtgaggagagtac

SEQ ID NO: 66912 - DNA, 22 bp, Artificial Sequence
  chemically synthesized
tgggaagaacataacactttcc

SEQ ID NO: 66913 - DNA, 22 bp, Artificial Sequence
  chemically synthesized
gggaagaacataacactttcca

SEQ ID NO: 66914 - DNA, 22 bp, Artificial Sequence
  chemically synthesized
ggaagaacataacactttccac

SEQ ID NO: 66915 - DNA, 22 bp, Artificial Sequence
  chemically synthesized
tccacccagcctgggcaacatg

SEQ ID NO: 66916 - DNA, 22 bp, Artificial Sequence
  chemically synthesized
ccacccagcctgggcaacatgg

SEQ ID NO: 66917 - DNA, 22 bp, Artificial Sequence
  chemically synthesized
cacccagcctgggcaacatggt

SEQ ID NO: 66918 - DNA, 22 bp, Artificial Sequence
  chemically synthesized
ggcaacatggtgagatcccatc

SEQ ID NO: 66919 - DNA, 22 bp, Artificial Sequence
  chemically synthesized
tacaaaaaatacaaaaattagc

SEQ ID NO: 66920 - DNA, 22 bp, Artificial Sequence
  chemically synthesized
caaaaaatacaaaaattagcca

SEQ ID NO: 66921 - DNA, 22 bp, Artificial Sequence
  chemically synthesized
gccaggtgtggtggtggcgcat

SEQ ID NO: 66922 - DNA, 22 bp, Artificial Sequence
  chemically synthesized
tagtcctagctacttgagagct

SEQ ID NO: 66923 - DNA, 22 bp, Artificial Sequence
  chemically synthesized
gctacttgagagctgaggcagg

SEQ ID NO: 66924 - DNA, 22 bp, Artificial Sequence
  chemically synthesized
cttgagagctgaggcaggagga

SEQ ID NO: 66925 - DNA, 22 bp, Artificial Sequence
  chemically synthesized
gagagctgaggcaggaggactg

SEQ ID NO: 66926 - DNA, 22 bp, Artificial Sequence
  chemically synthesized
agagctgaggcaggaggactgc

SEQ ID NO: 66927 - DNA, 22 bp, Artificial Sequence
  chemically synthesized
aggcaggaggactgcttgaact

SEQ ID NO: 66928 - DNA, 22 bp, Artificial Sequence
  chemically synthesized
cttgaactcgggaggcggaggt

SEQ ID NO: 66929 - DNA, 22 bp, Artificial Sequence
  chemically synthesized
gaactcgggaggcggaggttgc

SEQ ID NO: 66930 - DNA, 22 bp, Artificial Sequence
  chemically synthesized
aactcgggaggcggaggttgca

SEQ ID NO: 66931 - DNA, 22 bp, Artificial Sequence
  chemically synthesized
gggaggcggaggttgcagtgag

SEQ ID NO: 66932 - DNA, 22 bp, Artificial Sequence
  chemically synthesized
cagtgagccaagattgcaccac

SEQ ID NO: 66933 - DNA, 22 bp, Artificial Sequence
  chemically synthesized
caccactgcactccagcctggg

SEQ ID NO: 66934 - DNA, 22 bp, Artificial Sequence
  chemically synthesized
cactccagcctgggcaacagag

SEQ ID NO: 66935 - DNA, 22 bp, Artificial Sequence
  chemically synthesized
cagcctgggcaacagagtgaga

SEQ ID NO: 66936 - DNA, 22 bp, Artificial Sequence
  chemically synthesized
ggcaacagagtgagaccatgtc

SEQ ID NO: 66937 - DNA, 22 bp, Artificial Sequence
  chemically synthesized
aattaaaaaaaaaaaaaaaaaa

SEQ ID NO: 66938 - DNA, 22 bp, Artificial Sequence
  chemically synthesized
aaaaaaaaaaaaaaaaagcttt

SEQ ID NO: 66939 - DNA, 22 bp, Artificial Sequence
  chemically synthesized
tccataaaggccaggacagatg

SEQ ID NO: 66940 - DNA, 22 bp, Artificial Sequence
  chemically synthesized
ccataaaggccaggacagatgt

SEQ ID NO: 66941 - DNA, 22 bp, Artificial Sequence
  chemically synthesized
cataaaggccaggacagatgtg

SEQ ID NO: 66942 - DNA, 22 bp, Artificial Sequence
  chemically synthesized
ccttaagaagggctagagttgg

SEQ ID NO: 66943 - DNA, 22 bp, Artificial Sequence
  chemically synthesized
cttaagaagggctagagttgga

SEQ ID NO: 66944 - DNA, 22 bp, Artificial Sequence
  chemically synthesized
aagaagggctagagttggaggc

SEQ ID NO: 66945 - DNA, 22 bp, Artificial Sequence
  chemically synthesized
agaagggctagagttggaggcc

SEQ ID NO: 66946 - DNA, 22 bp, Artificial Sequence
  chemically synthesized
gagttggaggccttgccctcct

SEQ ID NO: 66947 - DNA, 22 bp, Artificial Sequence
  chemically synthesized
gaggccttgccctcctctgggc

SEQ ID NO: 66948 - DNA, 22 bp, Artificial Sequence
  chemically synthesized
gccctcctctgggcttgttggc

SEQ ID NO: 66949 - DNA, 22 bp, Artificial Sequence
  chemically synthesized
ccctcctctgggcttgttggcc

SEQ ID NO: 66950 - DNA, 22 bp, Artificial Sequence
  chemically synthesized
ctctgggcttgttggccttggg

SEQ ID NO: 66951 - DNA, 22 bp, Artificial Sequence
  chemically synthesized
tgggcttgttggccttggggga

SEQ ID NO: 66952 - DNA, 22 bp, Artificial Sequence
  chemically synthesized
ggcttgttggccttgggggagg

SEQ ID NO: 66953 - DNA, 22 bp, Artificial Sequence
  chemically synthesized
gttggccttgggggaggcctga

SEQ ID NO: 66954 - DNA, 22 bp, Artificial Sequence
  chemically synthesized
ttggccttgggggaggcctgac

SEQ ID NO: 66955 - DNA, 22 bp, Artificial Sequence
  chemically synthesized
gccttgggggaggcctgacaga

SEQ ID NO: 66956 - DNA, 22 bp, Artificial Sequence
  chemically synthesized
gggggaggcctgacagagcctt

SEQ ID NO: 66957 - DNA, 22 bp, Artificial Sequence
  chemically synthesized
ggggaggcctgacagagccttc

SEQ ID NO: 66958 - DNA, 22 bp, Artificial Sequence
  chemically synthesized
acagagccttcctggggctgcc

SEQ ID NO: 66959 - DNA, 22 bp, Artificial Sequence
  chemically synthesized
cctggggctgcctgttcttctg

SEQ ID NO: 66960 - DNA, 22 bp, Artificial Sequence
  chemically synthesized
ctggggctgcctgttcttctgg

SEQ ID NO: 66961 - DNA, 22 bp, Artificial Sequence
  chemically synthesized
gggctgcctgttcttctggccc

SEQ ID NO: 66962 - DNA, 22 bp, Artificial Sequence
  chemically synthesized
cctgttcttctggccccttctc

SEQ ID NO: 66963 - DNA, 22 bp, Artificial Sequence
  chemically synthesized
ttcttctggccccttctccgtg

SEQ ID NO: 66964 - DNA, 22 bp, Artificial Sequence
  chemically synthesized
ttctggccccttctccgtgcac

SEQ ID NO: 66965 - DNA, 22 bp, Artificial Sequence
  chemically synthesized
ctggccccttctccgtgcacag

SEQ ID NO: 66966 - DNA, 22 bp, Artificial Sequence
  chemically synthesized
tggccccttctccgtgcacaga

SEQ ID NO: 66967 - DNA, 22 bp, Artificial Sequence
  chemically synthesized
gccccttctccgtgcacagacc

SEQ ID NO: 66968 - DNA, 22 bp, Artificial Sequence
  chemically synthesized
ctccgtgcacagaccagtcttg

SEQ ID NO: 66969 - DNA, 22 bp, Artificial Sequence
  chemically synthesized
tccgtgcacagaccagtcttgg

SEQ ID NO: 66970 - DNA, 22 bp, Artificial Sequence
  chemically synthesized
cgtgcacagaccagtcttggat

SEQ ID NO: 66971 - DNA, 22 bp, Artificial Sequence
  chemically synthesized
ggatgataagtcaggaaagccc

SEQ ID NO: 66972 - DNA, 22 bp, Artificial Sequence
  chemically synthesized
gatgataagtcaggaaagccct

SEQ ID NO: 66973 - DNA, 22 bp, Artificial Sequence
  chemically synthesized
cacctggccgggctgcagtgtc

SEQ ID NO: 66974 - DNA, 22 bp, Artificial Sequence
  chemically synthesized
gccgggctgcagtgtcgctggg

SEQ ID NO: 66975 - DNA, 22 bp, Artificial Sequence
  chemically synthesized
cagtgtcgctggggctgcccac

SEQ ID NO: 66976 - DNA, 22 bp, Artificial Sequence
  chemically synthesized
gggctgcccacacttgctgacc

SEQ ID NO: 66977 - DNA, 22 bp, Artificial Sequence
  chemically synthesized
cccacacttgctgaccatggct

SEQ ID NO: 66978 - DNA, 22 bp, Artificial Sequence
  chemically synthesized
gctgaccatggctccccactcc

SEQ ID NO: 66979 - DNA, 22 bp, Artificial Sequence
  chemically synthesized
ctgaccatggctccccactccc

SEQ ID NO: 66980 - DNA, 22 bp, Artificial Sequence
  chemically synthesized
accatggctccccactcccttg

SEQ ID NO: 66981 - DNA, 22 bp, Artificial Sequence
  chemically synthesized
cccactcccttgtctctcacag

SEQ ID NO: 66982 - DNA, 22 bp, Artificial Sequence
  chemically synthesized
ccttgtctctcacagcaccact

SEQ ID NO: 66983 - DNA, 22 bp, Artificial Sequence
  chemically synthesized
gtctctcacagcaccactgccc

SEQ ID NO: 66984 - DNA, 22 bp, Artificial Sequence
  chemically synthesized
tctctcacagcaccactgcccc

SEQ ID NO: 66985 - DNA, 22 bp, Artificial Sequence
  chemically synthesized
tcacagcaccactgcccctgtt

SEQ ID NO: 66986 - DNA, 22 bp, Artificial Sequence
  chemically synthesized
acagcaccactgcccctgtttc

SEQ ID NO: 66987 - DNA, 22 bp, Artificial Sequence
  chemically synthesized
cccctgtttccacagtgcccac

SEQ ID NO: 66988 - DNA, 22 bp, Artificial Sequence
  chemically synthesized
tttccacagtgcccacgaacaa

SEQ ID NO: 66989 - DNA, 22 bp, Artificial Sequence
  chemically synthesized
ccacagtgcccacgaacaaaac

SEQ ID NO: 66990 - DNA, 22 bp, Artificial Sequence
  chemically synthesized
cacagtgcccacgaacaaaaca

SEQ ID NO: 66991 - DNA, 22 bp, Artificial Sequence
  chemically synthesized
ttggaaacaccatgtttgatta

SEQ ID NO: 66992 - DNA, 22 bp, Artificial Sequence
  chemically synthesized
ggaaacaccatgtttgattatt

SEQ ID NO: 66993 - DNA, 22 bp, Artificial Sequence
  chemically synthesized
gaaacaccatgtttgattattt

SEQ ID NO: 66994 - DNA, 22 bp, Artificial Sequence
  chemically synthesized
gattatttctttctttctttct

SEQ ID NO: 66995 - DNA, 22 bp, Artificial Sequence
  chemically synthesized
attatttctttctttctttctt

SEQ ID NO: 66996 - DNA, 22 bp, Artificial Sequence
  chemically synthesized
tttctttctttctttctttctt

SEQ ID NO: 66997 - DNA, 22 bp, Artificial Sequence
  chemically synthesized
ctttctttctttctttctttat

SEQ ID NO: 66998 - DNA, 22 bp, Artificial Sequence
  chemically synthesized
tttctttctttctttctttatt

SEQ ID NO: 66999 - DNA, 22 bp, Artificial Sequence
  chemically synthesized
tctttctttctttctttattta

SEQ ID NO: 67000 - DNA, 22 bp, Artificial Sequence
  chemically synthesized
ctttctttctttctttatttat

SEQ ID NO: 67001 - DNA, 22 bp, Artificial Sequence
  chemically synthesized
tttctttctttctttatttatt

SEQ ID NO: 67002 - DNA, 22 bp, Artificial Sequence
  chemically synthesized
tctttctttctttatttatttt

SEQ ID NO: 67003 - DNA, 22 bp, Artificial Sequence
  chemically synthesized
ctttctttctttatttatttta

SEQ ID NO: 67004 - DNA, 22 bp, Artificial Sequence
  chemically synthesized
tttctttctttatttattttac

SEQ ID NO: 67005 - DNA, 22 bp, Artificial Sequence
  chemically synthesized
tctttctttatttattttactc

SEQ ID NO: 67006 - DNA, 22 bp, Artificial Sequence
  chemically synthesized
ctttctttatttattttactct

SEQ ID NO: 67007 - DNA, 22 bp, Artificial Sequence
  chemically synthesized
tttctttatttattttactcta

SEQ ID NO: 67008 - DNA, 22 bp, Artificial Sequence
  chemically synthesized
tctttatttattttactctaag

SEQ ID NO: 67009 - DNA, 22 bp, Artificial Sequence
  chemically synthesized
ctttatttattttactctaagt

SEQ ID NO: 67010 - DNA, 22 bp, Artificial Sequence
  chemically synthesized
tttatttattttactctaagtt

SEQ ID NO: 67011 - DNA, 22 bp, Artificial Sequence
  chemically synthesized
tatttattttactctaagttct

SEQ ID NO: 67012 - DNA, 22 bp, Artificial Sequence
  chemically synthesized
atttattttactctaagttctg

SEQ ID NO: 67013 - DNA, 22 bp, Artificial Sequence
  chemically synthesized
tttattttactctaagttctgg

SEQ ID NO: 67014 - DNA, 22 bp, Artificial Sequence
  chemically synthesized
attttactctaagttctgggat

SEQ ID NO: 67015 - DNA, 22 bp, Artificial Sequence
  chemically synthesized
ttttactctaagttctgggata

SEQ ID NO: 67016 - DNA, 22 bp, Artificial Sequence
  chemically synthesized
tactctaagttctgggatacat

SEQ ID NO: 67017 - DNA, 22 bp, Artificial Sequence
  chemically synthesized
actctaagttctgggatacatg

SEQ ID NO: 67018 - DNA, 22 bp, Artificial Sequence
  chemically synthesized
ctctaagttctgggatacatgt

SEQ ID NO: 67019 - DNA, 22 bp, Artificial Sequence
  chemically synthesized
taagttctgggatacatgtgca

SEQ ID NO: 67020 - DNA, 22 bp, Artificial Sequence
  chemically synthesized
agttctgggatacatgtgcaga

SEQ ID NO: 67021 - DNA, 22 bp, Artificial Sequence
  chemically synthesized
tgggatacatgtgcagaatgtg

SEQ ID NO: 67022 - DNA, 22 bp, Artificial Sequence
  chemically synthesized
ggatacatgtgcagaatgtgca

SEQ ID NO: 67023 - DNA, 22 bp, Artificial Sequence
  chemically synthesized
gttacataagtatacatgtacc

SEQ ID NO: 67024 - DNA, 22 bp, Artificial Sequence
  chemically synthesized
ttacataagtatacatgtacca

SEQ ID NO: 67025 - DNA, 22 bp, Artificial Sequence
  chemically synthesized
cataagtatacatgtaccatgg

SEQ ID NO: 67026 - DNA, 22 bp, Artificial Sequence
  chemically synthesized
gctgcacctatcaacccatcat

SEQ ID NO: 67027 - DNA, 22 bp, Artificial Sequence
  chemically synthesized
ctgcacctatcaacccatcatc

SEQ ID NO: 67028 - DNA, 22 bp, Artificial Sequence
  chemically synthesized
cacctatcaacccatcatctac

SEQ ID NO: 67029 - DNA, 22 bp, Artificial Sequence
  chemically synthesized
tcaacccatcatctacattagg

SEQ ID NO: 67030 - DNA, 22 bp, Artificial Sequence
  chemically synthesized
cattaggcatttctcctaatgc

SEQ ID NO: 67031 - DNA, 22 bp, Artificial Sequence
  chemically synthesized
ggcatttctcctaatgctatcc

SEQ ID NO: 67032 - DNA, 22 bp, Artificial Sequence
  chemically synthesized
ctcctaatgctatccctcccct

SEQ ID NO: 67033 - DNA, 22 bp, Artificial Sequence
  chemically synthesized
tcctaatgctatccctcccctt

SEQ ID NO: 67034 - DNA, 22 bp, Artificial Sequence
  chemically synthesized
ctaatgctatccctccccttgc

SEQ ID NO: 67035 - DNA, 22 bp, Artificial Sequence
  chemically synthesized
atgctatccctccccttgcccc

SEQ ID NO: 67036 - DNA, 22 bp, Artificial Sequence
  chemically synthesized
tccctccccttgcccctccacc

SEQ ID NO: 67037 - DNA, 22 bp, Artificial Sequence
  chemically synthesized
cccttgcccctccacccatgtt

SEQ ID NO: 67038 - DNA, 22 bp, Artificial Sequence
  chemically synthesized
gcccctccacccatgtttggtt

SEQ ID NO: 67039 - DNA, 22 bp, Artificial Sequence
  chemically synthesized
cccctccacccatgtttggttt

SEQ ID NO: 67040 - DNA, 22 bp, Artificial Sequence
  chemically synthesized
cacccatgtttggttttcttta

SEQ ID NO: 67041 - DNA, 22 bp, Artificial Sequence
  chemically synthesized
ggttttctttagcttattctag

SEQ ID NO: 67042 - DNA, 22 bp, Artificial Sequence
  chemically synthesized
gttttctttagcttattctagt

SEQ ID NO: 67043 - DNA, 22 bp, Artificial Sequence
  chemically synthesized
tctttagcttattctagtattt

SEQ ID NO: 67044 - DNA, 22 bp, Artificial Sequence
  chemically synthesized
ctttagcttattctagtatttt

SEQ ID NO: 67045 - DNA, 22 bp, Artificial Sequence
  chemically synthesized
tttagcttattctagtattttc

SEQ ID NO: 67046 - DNA, 22 bp, Artificial Sequence
  chemically synthesized
tagcttattctagtattttctc

SEQ ID NO: 67047 - DNA, 22 bp, Artificial Sequence
  chemically synthesized
agcttattctagtattttctca

SEQ ID NO: 67048 - DNA, 22 bp, Artificial Sequence
  chemically synthesized
gcttattctagtattttctcaa

SEQ ID NO: 67049 - DNA, 22 bp, Artificial Sequence
  chemically synthesized
attctagtattttctcaagacc

SEQ ID NO: 67050 - DNA, 22 bp, Artificial Sequence
  chemically synthesized
ttctagtattttctcaagaccg

SEQ ID NO: 67051 - DNA, 22 bp, Artificial Sequence
  chemically synthesized
tagtattttctcaagaccgatc

SEQ ID NO: 67052 - DNA, 22 bp, Artificial Sequence
  chemically synthesized
gtattttctcaagaccgatcga

SEQ ID NO: 67053 - DNA, 22 bp, Artificial Sequence
  chemically synthesized
tctcaagaccgatcgaaatgat

SEQ ID NO: 67054 - DNA, 22 bp, Artificial Sequence
  chemically synthesized
ctcaagaccgatcgaaatgata

SEQ ID NO: 67055 - DNA, 22 bp, Artificial Sequence
  chemically synthesized
tcaagaccgatcgaaatgataa

SEQ ID NO: 67056 - DNA, 22 bp, Artificial Sequence
  chemically synthesized
aagaccgatcgaaatgataata

SEQ ID NO: 67057 - DNA, 22 bp, Artificial Sequence
  chemically synthesized
gttgtgagttgatgcagataaa

SEQ ID NO: 67058 - DNA, 22 bp, Artificial Sequence
  chemically synthesized
ttgtgagttgatgcagataaaa

SEQ ID NO: 67059 - DNA, 22 bp, Artificial Sequence
  chemically synthesized
tgagttgatgcagataaaaagg

SEQ ID NO: 67060 - DNA, 22 bp, Artificial Sequence
  chemically synthesized
atgcagataaaaaggcttgggg

SEQ ID NO: 67061 - DNA, 22 bp, Artificial Sequence
  chemically synthesized
ggggtggtcttcagagtaattt

SEQ ID NO: 67062 - DNA, 22 bp, Artificial Sequence
  chemically synthesized
gggtggtcttcagagtaatttg

SEQ ID NO: 67063 - DNA, 22 bp, Artificial Sequence
  chemically synthesized
cagagtaatttgggagttgtgt

SEQ ID NO: 67064 - DNA, 22 bp, Artificial Sequence
  chemically synthesized
agagtaatttgggagttgtgtg

SEQ ID NO: 67065 - DNA, 22 bp, Artificial Sequence
  chemically synthesized
gggagttgtgtgttctgctggc

SEQ ID NO: 67066 - DNA, 22 bp, Artificial Sequence
  chemically synthesized
ggagttgtgtgttctgctggct

SEQ ID NO: 67067 - DNA, 22 bp, Artificial Sequence
  chemically synthesized
tgtgttctgctggctttgatag

SEQ ID NO: 67068 - DNA, 22 bp, Artificial Sequence
  chemically synthesized
tgctggctttgatagacaagcc

SEQ ID NO: 67069 - DNA, 22 bp, Artificial Sequence
  chemically synthesized
ctggctttgatagacaagccct

SEQ ID NO: 67070 - DNA, 22 bp, Artificial Sequence
  chemically synthesized
gctttgatagacaagcccttct

SEQ ID NO: 67071 - DNA, 22 bp, Artificial Sequence
  chemically synthesized
tgatagacaagcccttctctgc

SEQ ID NO: 67072 - DNA, 22 bp, Artificial Sequence
  chemically synthesized
gatagacaagcccttctctgct

SEQ ID NO: 67073 - DNA, 22 bp, Artificial Sequence
  chemically synthesized
atagacaagcccttctctgctc

SEQ ID NO: 67074 - DNA, 22 bp, Artificial Sequence
  chemically synthesized
ctctgctctggcaggtgttatc

SEQ ID NO: 67075 - DNA, 22 bp, Artificial Sequence
  chemically synthesized
tctgctctggcaggtgttatca

SEQ ID NO: 67076 - DNA, 22 bp, Artificial Sequence
  chemically synthesized
tgctctggcaggtgttatcaga

SEQ ID NO: 67077 - DNA, 22 bp, Artificial Sequence
  chemically synthesized
ctctggcaggtgttatcagaat

SEQ ID NO: 67078 - DNA, 22 bp, Artificial Sequence
  chemically synthesized
tggcaggtgttatcagaatcaa

SEQ ID NO: 67079 - DNA, 22 bp, Artificial Sequence
  chemically synthesized
gcaggtgttatcagaatcaaac

SEQ ID NO: 67080 - DNA, 22 bp, Artificial Sequence
  chemically synthesized
tcagaatcaaacgtttgcaaat

SEQ ID NO: 67081 - DNA, 22 bp, Artificial Sequence
  chemically synthesized
gcaaatgatcattctcatcgca

SEQ ID NO: 67082 - DNA, 22 bp, Artificial Sequence
  chemically synthesized
caaatgatcattctcatcgcat

SEQ ID NO: 67083 - DNA, 22 bp, Artificial Sequence
  chemically synthesized
tcatcgcatccatcttcacagc

SEQ ID NO: 67084 - DNA, 22 bp, Artificial Sequence
  chemically synthesized
atcgcatccatcttcacagccc

SEQ ID NO: 67085 - DNA, 22 bp, Artificial Sequence
  chemically synthesized
cacagccccatgcctcttcctg

SEQ ID NO: 67086 - DNA, 22 bp, Artificial Sequence
  chemically synthesized
acagccccatgcctcttcctga

SEQ ID NO: 67087 - DNA, 22 bp, Artificial Sequence
  chemically synthesized
ttcctgaatgctcagttgaaaa

SEQ ID NO: 67088 - DNA, 22 bp, Artificial Sequence
  chemically synthesized
cctgaatgctcagttgaaaatg

SEQ ID NO: 67089 - DNA, 22 bp, Artificial Sequence
  chemically synthesized
ctgaatgctcagttgaaaatgc

SEQ ID NO: 67090 - DNA, 22 bp, Artificial Sequence
  chemically synthesized
aatgctcagttgaaaatgcgta

SEQ ID NO: 67091 - DNA, 22 bp, Artificial Sequence
  chemically synthesized
agttgaaaatgcgtatttcacc

SEQ ID NO: 67092 - DNA, 22 bp, Artificial Sequence
  chemically synthesized
aaaatgcgtatttcaccttcct

SEQ ID NO: 67093 - DNA, 22 bp, Artificial Sequence
  chemically synthesized
caccttcctcaggtatctaata

SEQ ID NO: 67094 - DNA, 22 bp, Artificial Sequence
  chemically synthesized
accttcctcaggtatctaatac

SEQ ID NO: 67095 - DNA, 22 bp, Artificial Sequence
  chemically synthesized
cctcaggtatctaatacttaac

SEQ ID NO: 67096 - DNA, 22 bp, Artificial Sequence
  chemically synthesized
ctcaggtatctaatacttaacc

SEQ ID NO: 67097 - DNA, 22 bp, Artificial Sequence
  chemically synthesized
aggtatctaatacttaacctgg

SEQ ID NO: 67098 - DNA, 22 bp, Artificial Sequence
  chemically synthesized
atacttaacctgggagaaacgc

SEQ ID NO: 67099 - DNA, 22 bp, Artificial Sequence
  chemically synthesized
aacctgggagaaacgcaagtgt

SEQ ID NO: 67100 - DNA, 22 bp, Artificial Sequence
  chemically synthesized
acctgggagaaacgcaagtgtg

SEQ ID NO: 67101 - DNA, 22 bp, Artificial Sequence
  chemically synthesized
ggagaaacgcaagtgtggtttg

SEQ ID NO: 67102 - DNA, 22 bp, Artificial Sequence
  chemically synthesized
gcaaggctttccaggtgtccaa

SEQ ID NO: 67103 - DNA, 22 bp, Artificial Sequence
  chemically synthesized
caaggctttccaggtgtccaaa

SEQ ID NO: 67104 - DNA, 22 bp, Artificial Sequence
  chemically synthesized
tccaggtgtccaaatgatgatt

SEQ ID NO: 67105 - DNA, 22 bp, Artificial Sequence
  chemically synthesized
ccaggtgtccaaatgatgattt

SEQ ID NO: 67106 - DNA, 22 bp, Artificial Sequence
  chemically synthesized
caggtgtccaaatgatgatttc

SEQ ID NO: 67107 - DNA, 22 bp, Artificial Sequence
  chemically synthesized
cccatccttttcttcatttctc

SEQ ID NO: 67108 - DNA, 22 bp, Artificial Sequence
  chemically synthesized
ccatccttttcttcatttctcg

SEQ ID NO: 67109 - DNA, 22 bp, Artificial Sequence
  chemically synthesized
ttcttcatttctcgagtggggc

SEQ ID NO: 67110 - DNA, 22 bp, Artificial Sequence
  chemically synthesized
tcttcatttctcgagtggggca

SEQ ID NO: 67111 - DNA, 22 bp, Artificial Sequence
  chemically synthesized
cttcatttctcgagtggggcag

SEQ ID NO: 67112 - DNA, 22 bp, Artificial Sequence
  chemically synthesized
ttcatttctcgagtggggcagg

SEQ ID NO: 67113 - DNA, 22 bp, Artificial Sequence
  chemically synthesized
catttctcgagtggggcaggga

SEQ ID NO: 67114 - DNA, 22 bp, Artificial Sequence
  chemically synthesized
atttctcgagtggggcagggag

SEQ ID NO: 67115 - DNA, 22 bp, Artificial Sequence
  chemically synthesized
ctcgagtggggcagggaggcat

SEQ ID NO: 67116 - DNA, 22 bp, Artificial Sequence
  chemically synthesized
tcgagtggggcagggaggcatc

SEQ ID NO: 67117 - DNA, 22 bp, Artificial Sequence
  chemically synthesized
gagtggggcagggaggcatcgg

SEQ ID NO: 67118 - DNA, 22 bp, Artificial Sequence
  chemically synthesized
gtgatacgtttgtgtgaagctg

SEQ ID NO: 67119 - DNA, 22 bp, Artificial Sequence
  chemically synthesized
tgatacgtttgtgtgaagctgg

SEQ ID NO: 67120 - DNA, 22 bp, Artificial Sequence
  chemically synthesized
gtgtgaagctggacaattcggg

SEQ ID NO: 67121 - DNA, 22 bp, Artificial Sequence
  chemically synthesized
tgtgaagctggacaattcgggt

SEQ ID NO: 67122 - DNA, 22 bp, Artificial Sequence
  chemically synthesized
gacaattcgggtgacagaaata

SEQ ID NO: 67123 - DNA, 22 bp, Artificial Sequence
  chemically synthesized
gggtgacagaaatatgttcagg

SEQ ID NO: 67124 - DNA, 22 bp, Artificial Sequence
  chemically synthesized
agggcagtgtcttttatcgtcc

SEQ ID NO: 67125 - DNA, 22 bp, Artificial Sequence
  chemically synthesized
ttatcgtcccttctaactacaa

SEQ ID NO: 67126 - DNA, 22 bp, Artificial Sequence
  chemically synthesized
tatcgtcccttctaactacaaa

SEQ ID NO: 67127 - DNA, 22 bp, Artificial Sequence
  chemically synthesized
atcgtcccttctaactacaaag

SEQ ID NO: 67128 - DNA, 22 bp, Artificial Sequence
  chemically synthesized
tcgtcccttctaactacaaagg

SEQ ID NO: 67129 - DNA, 22 bp, Artificial Sequence
  chemically synthesized
ctaactacaaaggcatggattg

SEQ ID NO: 67130 - DNA, 22 bp, Artificial Sequence
  chemically synthesized
taactacaaaggcatggattgc

SEQ ID NO: 67131 - DNA, 22 bp, Artificial Sequence
  chemically synthesized
actacaaaggcatggattgcag

SEQ ID NO: 67132 - DNA, 22 bp, Artificial Sequence
  chemically synthesized
caaaggcatggattgcagttga

SEQ ID NO: 67133 - DNA, 22 bp, Artificial Sequence
  chemically synthesized
cagttgagccccactttcagaa

SEQ ID NO: 67134 - DNA, 22 bp, Artificial Sequence
  chemically synthesized
agccccactttcagaaggccca

SEQ ID NO: 67135 - DNA, 22 bp, Artificial Sequence
  chemically synthesized
tcagaaggcccaatacacacaa

SEQ ID NO: 67136 - DNA, 22 bp, Artificial Sequence
  chemically synthesized
cagaaggcccaatacacacaaa

SEQ ID NO: 67137 - DNA, 22 bp, Artificial Sequence
  chemically synthesized
agaaggcccaatacacacaaaa

SEQ ID NO: 67138 - DNA, 22 bp, Artificial Sequence
  chemically synthesized
attaatggaaactgataaatta

SEQ ID NO: 67139 - DNA, 22 bp, Artificial Sequence
  chemically synthesized
atggaaactgataaattagaga

SEQ ID NO: 67140 - DNA, 22 bp, Artificial Sequence
  chemically synthesized
ataaattagagagtgatttttc

SEQ ID NO: 67141 - DNA, 22 bp, Artificial Sequence
  chemically synthesized
gagagtgatttttcacattaca

SEQ ID NO: 67142 - DNA, 22 bp, Artificial Sequence
  chemically synthesized
ttcacattacagaaagattgtt

SEQ ID NO: 67143 - DNA, 22 bp, Artificial Sequence
  chemically synthesized
tcacattacagaaagattgtta

SEQ ID NO: 67144 - DNA, 22 bp, Artificial Sequence
  chemically synthesized
cacattacagaaagattgttaa

SEQ ID NO: 67145 - DNA, 22 bp, Artificial Sequence
  chemically synthesized
acattacagaaagattgttaac

SEQ ID NO: 67146 - DNA, 22 bp, Artificial Sequence
  chemically synthesized
cagaaagattgttaacttttca

SEQ ID NO: 67147 - DNA, 22 bp, Artificial Sequence
  chemically synthesized
ttaacttttcaaaaggtttcac

SEQ ID NO: 67148 - DNA, 22 bp, Artificial Sequence
  chemically synthesized
acttttcaaaaggtttcaccac

SEQ ID NO: 67149 - DNA, 22 bp, Artificial Sequence
  chemically synthesized
ttcaaaaggtttcaccacaggg

SEQ ID NO: 67150 - DNA, 22 bp, Artificial Sequence
  chemically synthesized
tcaaaaggtttcaccacagggt

SEQ ID NO: 67151 - DNA, 22 bp, Artificial Sequence
  chemically synthesized
caaaaggtttcaccacagggtt

SEQ ID NO: 67152 - DNA, 22 bp, Artificial Sequence
  chemically synthesized
aaaaggtttcaccacagggttt

SEQ ID NO: 67153 - DNA, 22 bp, Artificial Sequence
  chemically synthesized
caccacagggtttctttaaata

SEQ ID NO: 67154 - DNA, 22 bp, Artificial Sequence
  chemically synthesized
accacagggtttctttaaatag

SEQ ID NO: 67155 - DNA, 22 bp, Artificial Sequence
  chemically synthesized
ctttaaatagtgagctccccca

SEQ ID NO: 67156 - DNA, 22 bp, Artificial Sequence
  chemically synthesized
tttaaatagtgagctcccccac

SEQ ID NO: 67157 - DNA, 22 bp, Artificial Sequence
  chemically synthesized
taaatagtgagctcccccactg

SEQ ID NO: 67158 - DNA, 22 bp, Artificial Sequence
  chemically synthesized
aaatagtgagctcccccactga

SEQ ID NO: 67159 - DNA, 22 bp, Artificial Sequence
  chemically synthesized
aatagtgagctcccccactgaa

SEQ ID NO: 67160 - DNA, 22 bp, Artificial Sequence
  chemically synthesized
ccccactgaatttaaagtgttt

SEQ ID NO: 67161 - DNA, 22 bp, Artificial Sequence
  chemically synthesized
aatttaaagtgtttgtttacag

SEQ ID NO: 67162 - DNA, 22 bp, Artificial Sequence
  chemically synthesized
aaagtgtttgtttacagatcat

SEQ ID NO: 67163 - DNA, 22 bp, Artificial Sequence
  chemically synthesized
aagtgtttgtttacagatcatt

SEQ ID NO: 67164 - DNA, 22 bp, Artificial Sequence
  chemically synthesized
gtttacagatcattaactactt

SEQ ID NO: 67165 - DNA, 22 bp, Artificial Sequence
  chemically synthesized
tttacagatcattaactacttg

SEQ ID NO: 67166 - DNA, 22 bp, Artificial Sequence
  chemically synthesized
acagatcattaactacttgaca

SEQ ID NO: 67167 - DNA, 22 bp, Artificial Sequence
  chemically synthesized
cagatcattaactacttgacag

SEQ ID NO: 67168 - DNA, 22 bp, Artificial Sequence
  chemically synthesized
actacttgacagagaggatatt

SEQ ID NO: 67169 - DNA, 22 bp, Artificial Sequence
  chemically synthesized
cttgacagagaggatattgggg

SEQ ID NO: 67170 - DNA, 22 bp, Artificial Sequence
  chemically synthesized
gacagagaggatattgggggtt

SEQ ID NO: 67171 - DNA, 22 bp, Artificial Sequence
  chemically synthesized
acagagaggatattgggggttg

SEQ ID NO: 67172 - DNA, 22 bp, Artificial Sequence
  chemically synthesized
ggggttgggggaaggaagacac

SEQ ID NO: 67173 - DNA, 22 bp, Artificial Sequence
  chemically synthesized
ggggaaggaagacacacttaaa

SEQ ID NO: 67174 - DNA, 22 bp, Artificial Sequence
  chemically synthesized
aaaaggtaaaatgttagaagcc

SEQ ID NO: 67175 - DNA, 22 bp, Artificial Sequence
  chemically synthesized
aaaggtaaaatgttagaagccc

SEQ ID NO: 67176 - DNA, 22 bp, Artificial Sequence
  chemically synthesized
gaagccctgccaattttcaatg

SEQ ID NO: 67177 - DNA, 22 bp, Artificial Sequence
  chemically synthesized
ccaattttcaatgagcctggaa

SEQ ID NO: 67178 - DNA, 22 bp, Artificial Sequence
  chemically synthesized
tcaatgagcctggaagggtgac

SEQ ID NO: 67179 - DNA, 22 bp, Artificial Sequence
  chemically synthesized
caatgagcctggaagggtgacg

SEQ ID NO: 67180 - DNA, 22 bp, Artificial Sequence
  chemically synthesized
aatgagcctggaagggtgacga

SEQ ID NO: 67181 - DNA, 22 bp, Artificial Sequence
  chemically synthesized
gaagggtgacgaaacatctctg

SEQ ID NO: 67182 - DNA, 22 bp, Artificial Sequence
  chemically synthesized
tgaaattatgttggttagcaaa

SEQ ID NO: 67183 - DNA, 22 bp, Artificial Sequence
  chemically synthesized
aaattatgttggttagcaaata

SEQ ID NO: 67184 - DNA, 22 bp, Artificial Sequence
  chemically synthesized
tgttggttagcaaatatgattt

SEQ ID NO: 67185 - DNA, 22 bp, Artificial Sequence
  chemically synthesized
gttagcaaatatgatttatttt

SEQ ID NO: 67186 - DNA, 22 bp, Artificial Sequence
  chemically synthesized
gcaaatatgatttattttacag

SEQ ID NO: 67187 - DNA, 22 bp, Artificial Sequence
  chemically synthesized
attttacagaaattcattttac

SEQ ID NO: 67188 - DNA, 22 bp, Artificial Sequence
  chemically synthesized
ttttacagaaattcattttaca

SEQ ID NO: 67189 - DNA, 22 bp, Artificial Sequence
  chemically synthesized
tacagaaattcattttacacat

SEQ ID NO: 67190 - DNA, 22 bp, Artificial Sequence
  chemically synthesized
acagaaattcattttacacatg

SEQ ID NO: 67191 - DNA, 22 bp, Artificial Sequence
  chemically synthesized
cagaaattcattttacacatgg

SEQ ID NO: 67192 - DNA, 22 bp, Artificial Sequence
  chemically synthesized
attttacacatggctttccaag

SEQ ID NO: 67193 - DNA, 22 bp, Artificial Sequence
  chemically synthesized
tacacatggctttccaagaacc

SEQ ID NO: 67194 - DNA, 22 bp, Artificial Sequence
  chemically synthesized
acacatggctttccaagaaccc

SEQ ID NO: 67195 - DNA, 22 bp, Artificial Sequence
  chemically synthesized
cacatggctttccaagaaccct

SEQ ID NO: 67196 - DNA, 22 bp, Artificial Sequence
  chemically synthesized
tccaagaaccctccatgctgat

SEQ ID NO: 67197 - DNA, 22 bp, Artificial Sequence
  chemically synthesized
ccaagaaccctccatgctgatg

SEQ ID NO: 67198 - DNA, 22 bp, Artificial Sequence
  chemically synthesized
caagaaccctccatgctgatgg

SEQ ID NO: 67199 - DNA, 22 bp, Artificial Sequence
  chemically synthesized
catgctgatggggtgtggtggg

SEQ ID NO: 67200 - DNA, 22 bp, Artificial Sequence
  chemically synthesized
atggggtgtggtgggaggtcaa

SEQ ID NO: 67201 - DNA, 22 bp, Artificial Sequence
  chemically synthesized
ggctttgctgtcctggtttgtg

SEQ ID NO: 67202 - DNA, 22 bp, Artificial Sequence
  chemically synthesized
tgctgtcctggtttgtggtggc

SEQ ID NO: 67203 - DNA, 22 bp, Artificial Sequence
  chemically synthesized
gctgtcctggtttgtggtggct

SEQ ID NO: 67204 - DNA, 22 bp, Artificial Sequence
  chemically synthesized
ctgtcctggtttgtggtggctg

SEQ ID NO: 67205 - DNA, 22 bp, Artificial Sequence
  chemically synthesized
tcctggtttgtggtggctgggg

SEQ ID NO: 67206 - DNA, 22 bp, Artificial Sequence
  chemically synthesized
gtttgtggtggctggggagagg

SEQ ID NO: 67207 - DNA, 22 bp, Artificial Sequence
  chemically synthesized
gtggtggctggggagaggactc

SEQ ID NO: 67208 - DNA, 22 bp, Artificial Sequence
  chemically synthesized
tggtggctggggagaggactcc

SEQ ID NO: 67209 - DNA, 22 bp, Artificial Sequence
  chemically synthesized
gggagaggactcccttttctta

SEQ ID NO: 67210 - DNA, 22 bp, Artificial Sequence
  chemically synthesized
ccttttcttagagtcctgtgtg

SEQ ID NO: 67211 - DNA, 22 bp, Artificial Sequence
  chemically synthesized
ttcttagagtcctgtgtgtgcc

SEQ ID NO: 67212 - DNA, 22 bp, Artificial Sequence
  chemically synthesized
tcttagagtcctgtgtgtgcct

SEQ ID NO: 67213 - DNA, 22 bp, Artificial Sequence
  chemically synthesized
cttagagtcctgtgtgtgcctt

SEQ ID NO: 67214 - DNA, 22 bp, Artificial Sequence
  chemically synthesized
ttagagtcctgtgtgtgccttt

SEQ ID NO: 67215 - DNA, 22 bp, Artificial Sequence
  chemically synthesized
agagtcctgtgtgtgcctttgt

SEQ ID NO: 67216 - DNA, 22 bp, Artificial Sequence
  chemically synthesized
gagtcctgtgtgtgcctttgtg

SEQ ID NO: 67217 - DNA, 22 bp, Artificial Sequence
  chemically synthesized
tgtgtgcctttgtgagcaatgg

SEQ ID NO: 67218 - DNA, 22 bp, Artificial Sequence
  chemically synthesized
tgtgagcaatgggtgccaggct

SEQ ID NO: 67219 - DNA, 22 bp, Artificial Sequence
  chemically synthesized
gtgagcaatgggtgccaggctc

SEQ ID NO: 67220 - DNA, 22 bp, Artificial Sequence
  chemically synthesized
tgagcaatgggtgccaggctct

SEQ ID NO: 67221 - DNA, 22 bp, Artificial Sequence
  chemically synthesized
tggcatgaggccgagctttgct

SEQ ID NO: 67222 - DNA, 22 bp, Artificial Sequence
  chemically synthesized
gcatgaggccgagctttgctac

SEQ ID NO: 67223 - DNA, 22 bp, Artificial Sequence
  chemically synthesized
tgctactggacttctggcatga

SEQ ID NO: 67224 - DNA, 22 bp, Artificial Sequence
  chemically synthesized
gctactggacttctggcatgag

SEQ ID NO: 67225 - DNA, 22 bp, Artificial Sequence
  chemically synthesized
ctactggacttctggcatgagc

SEQ ID NO: 67226 - DNA, 22 bp, Artificial Sequence
  chemically synthesized
ctggacttctggcatgagccac

SEQ ID NO: 67227 - DNA, 22 bp, Artificial Sequence
  chemically synthesized
gacttctggcatgagccactga

SEQ ID NO: 67228 - DNA, 22 bp, Artificial Sequence
  chemically synthesized
ctggcatgagccactgagacct

SEQ ID NO: 67229 - DNA, 22 bp, Artificial Sequence
  chemically synthesized
tggcatgagccactgagacctt

SEQ ID NO: 67230 - DNA, 22 bp, Artificial Sequence
  chemically synthesized
gcatgagccactgagacctttt

SEQ ID NO: 67231 - DNA, 22 bp, Artificial Sequence
  chemically synthesized
agaccttttcccttgacattta

SEQ ID NO: 67232 - DNA, 22 bp, Artificial Sequence
  chemically synthesized
ttcccttgacatttagcctggg

SEQ ID NO: 67233 - DNA, 22 bp, Artificial Sequence
  chemically synthesized
tcccttgacatttagcctgggt

SEQ ID NO: 67234 - DNA, 22 bp, Artificial Sequence
  chemically synthesized
cccttgacatttagcctgggtt

SEQ ID NO: 67235 - DNA, 22 bp, Artificial Sequence
  chemically synthesized
ccttgacatttagcctgggttt

SEQ ID NO: 67236 - DNA, 22 bp, Artificial Sequence
  chemically synthesized
gacatttagcctgggtttgggg

SEQ ID NO: 67237 - DNA, 22 bp, Artificial Sequence
  chemically synthesized
acatttagcctgggtttgggga

SEQ ID NO: 67238 - DNA, 22 bp, Artificial Sequence
  chemically synthesized
agcctgggtttggggaagtttc

SEQ ID NO: 67239 - DNA, 22 bp, Artificial Sequence
  chemically synthesized
gcctgggtttggggaagtttct

SEQ ID NO: 67240 - DNA, 22 bp, Artificial Sequence
  chemically synthesized
ggtttggggaagtttcttcctg

SEQ ID NO: 67241 - DNA, 22 bp, Artificial Sequence
  chemically synthesized
ggggaagtttcttcctggttct

SEQ ID NO: 67242 - DNA, 22 bp, Artificial Sequence
  chemically synthesized
gggaagtttcttcctggttctc

SEQ ID NO: 67243 - DNA, 22 bp, Artificial Sequence
  chemically synthesized
cttcctggttctctgaccttca

SEQ ID NO: 67244 - DNA, 22 bp, Artificial Sequence
  chemically synthesized
ttcctggttctctgaccttcag

SEQ ID NO: 67245 - DNA, 22 bp, Artificial Sequence
  chemically synthesized
cctggttctctgaccttcagtc

SEQ ID NO: 67246 - DNA, 22 bp, Artificial Sequence
  chemically synthesized
ctggttctctgaccttcagtct

SEQ ID NO: 67247 - DNA, 22 bp, Artificial Sequence
  chemically synthesized
gttctctgaccttcagtctcat

SEQ ID NO: 67248 - DNA, 22 bp, Artificial Sequence
  chemically synthesized
tctgaccttcagtctcattggc

SEQ ID NO: 67249 - DNA, 22 bp, Artificial Sequence
  chemically synthesized
tgaccttcagtctcattggctc

SEQ ID NO: 67250 - DNA, 22 bp, Artificial Sequence
  chemically synthesized
accttcagtctcattggctcag

SEQ ID NO: 67251 - DNA, 22 bp, Artificial Sequence
  chemically synthesized
cagtctcattggctcaggacac

SEQ ID NO: 67252 - DNA, 22 bp, Artificial Sequence
  chemically synthesized
agtctcattggctcaggacaca

SEQ ID NO: 67253 - DNA, 22 bp, Artificial Sequence
  chemically synthesized
attggctcaggacacacctagg

SEQ ID NO: 67254 - DNA, 22 bp, Artificial Sequence
  chemically synthesized
gctcaggacacacctaggtttc

SEQ ID NO: 67255 - DNA, 22 bp, Artificial Sequence
  chemically synthesized
aggacacacctaggtttcctcc

SEQ ID NO: 67256 - DNA, 22 bp, Artificial Sequence
  chemically synthesized
ggtttcctccttgaagctcaga

SEQ ID NO: 67257 - DNA, 22 bp, Artificial Sequence
  chemically synthesized
cctccttgaagctcagacatgt

SEQ ID NO: 67258 - DNA, 22 bp, Artificial Sequence
  chemically synthesized
ctccttgaagctcagacatgta

SEQ ID NO: 67259 - DNA, 22 bp, Artificial Sequence
  chemically synthesized
cttgaagctcagacatgtaaac

SEQ ID NO: 67260 - DNA, 22 bp, Artificial Sequence
  chemically synthesized
gaagctcagacatgtaaacttt

SEQ ID NO: 67261 - DNA, 22 bp, Artificial Sequence
  chemically synthesized
aagctcagacatgtaaactttg

SEQ ID NO: 67262 - DNA, 22 bp, Artificial Sequence
  chemically synthesized
agacatgtaaactttgcaagac

SEQ ID NO: 67263 - DNA, 22 bp, Artificial Sequence
  chemically synthesized
tgcaagactgtgtcccaggagg

SEQ ID NO: 67264 - DNA, 22 bp, Artificial Sequence
  chemically synthesized
gcaagactgtgtcccaggaggt

SEQ ID NO: 67265 - DNA, 22 bp, Artificial Sequence
  chemically synthesized
caagactgtgtcccaggaggtt

SEQ ID NO: 67266 - DNA, 22 bp, Artificial Sequence
  chemically synthesized
tgtcccaggaggttgaaatcca

SEQ ID NO: 67267 - DNA, 22 bp, Artificial Sequence
  chemically synthesized
aaatccatcatcaggctcactc

SEQ ID NO: 67268 - DNA, 22 bp, Artificial Sequence
  chemically synthesized
actctctaagcctaaggattag

SEQ ID NO: 67269 - DNA, 22 bp, Artificial Sequence
  chemically synthesized
tctaagcctaaggattagcctg

SEQ ID NO: 67270 - DNA, 22 bp, Artificial Sequence
  chemically synthesized
taagcctaaggattagcctggg

SEQ ID NO: 67271 - DNA, 22 bp, Artificial Sequence
  chemically synthesized
agcctaaggattagcctgggga

SEQ ID NO: 67272 - DNA, 22 bp, Artificial Sequence
  chemically synthesized
aggattagcctggggaccaagc

SEQ ID NO: 67273 - DNA, 22 bp, Artificial Sequence
  chemically synthesized
gcctggggaccaagcccagccc

SEQ ID NO: 67274 - DNA, 22 bp, Artificial Sequence
  chemically synthesized
gggaccaagcccagccctgaac

SEQ ID NO: 67275 - DNA, 22 bp, Artificial Sequence
  chemically synthesized
aactctcctataaggccctcct

SEQ ID NO: 67276 - DNA, 22 bp, Artificial Sequence
  chemically synthesized
tcctataaggccctcctcatcc

SEQ ID NO: 67277 - DNA, 22 bp, Artificial Sequence
  chemically synthesized
ctataaggccctcctcatccag

SEQ ID NO: 67278 - DNA, 22 bp, Artificial Sequence
  chemically synthesized
taaggccctcctcatccaggtc

SEQ ID NO: 67279 - DNA, 22 bp, Artificial Sequence
  chemically synthesized
ctcatccaggtcaaggtcatga

SEQ ID NO: 67280 - DNA, 22 bp, Artificial Sequence
  chemically synthesized
atccaggtcaaggtcatgaggg

SEQ ID NO: 67281 - DNA, 22 bp, Artificial Sequence
  chemically synthesized
gccagcttctagcacggcctat

SEQ ID NO: 67282 - DNA, 22 bp, Artificial Sequence
  chemically synthesized
ctagcacggcctatagtaggtc

SEQ ID NO: 67283 - DNA, 22 bp, Artificial Sequence
  chemically synthesized
tagcacggcctatagtaggtct

SEQ ID NO: 67284 - DNA, 22 bp, Artificial Sequence
  chemically synthesized
gcacggcctatagtaggtctct

SEQ ID NO: 67285 - DNA, 22 bp, Artificial Sequence
  chemically synthesized
tagtaggtctcttggttggtcc

SEQ ID NO: 67286 - DNA, 22 bp, Artificial Sequence
  chemically synthesized
ttggttggtccaaaggaggcct

SEQ ID NO: 67287 - DNA, 22 bp, Artificial Sequence
  chemically synthesized
ggttggtccaaaggaggcctgg

SEQ ID NO: 67288 - DNA, 22 bp, Artificial Sequence
  chemically synthesized
gttggtccaaaggaggcctgga

SEQ ID NO: 67289 - DNA, 22 bp, Artificial Sequence
  chemically synthesized
gtccaaaggaggcctggacttg

SEQ ID NO: 67290 - DNA, 22 bp, Artificial Sequence
  chemically synthesized
gacttgcatgggaggcaggaga

SEQ ID NO: 67291 - DNA, 22 bp, Artificial Sequence
  chemically synthesized
gcatgggaggcaggagagagaa

SEQ ID NO: 67292 - DNA, 22 bp, Artificial Sequence
  chemically synthesized
catgggaggcaggagagagaag

SEQ ID NO: 67293 - DNA, 22 bp, Artificial Sequence
  chemically synthesized
atccagtcttctccttttaaag

SEQ ID NO: 67294 - DNA, 22 bp, Artificial Sequence
  chemically synthesized
ctccttttaaagatggaaacac

SEQ ID NO: 67295 - DNA, 22 bp, Artificial Sequence
  chemically synthesized
tccttttaaagatggaaacact

SEQ ID NO: 67296 - DNA, 22 bp, Artificial Sequence
  chemically synthesized
cttttaaagatggaaacactta

SEQ ID NO: 67297 - DNA, 22 bp, Artificial Sequence
  chemically synthesized
ttaaagatggaaacacttaggg

SEQ ID NO: 67298 - DNA, 22 bp, Artificial Sequence
  chemically synthesized
taaagatggaaacacttagggc

SEQ ID NO: 67299 - DNA, 22 bp, Artificial Sequence
  chemically synthesized
aaagatggaaacacttagggcc

SEQ ID NO: 67300 - DNA, 22 bp, Artificial Sequence
  chemically synthesized
aagatggaaacacttagggcca

SEQ ID NO: 67301 - DNA, 22 bp, Artificial Sequence
  chemically synthesized
agggccagaaagaaaggattta

SEQ ID NO: 67302 - DNA, 22 bp, Artificial Sequence
  chemically synthesized
gggccagaaagaaaggatttat

SEQ ID NO: 67303 - DNA, 22 bp, Artificial Sequence
  chemically synthesized
attcaaagtcacgaaacagctg

SEQ ID NO: 67304 - DNA, 22 bp, Artificial Sequence
  chemically synthesized
ttcaaagtcacgaaacagctgg

SEQ ID NO: 67305 - DNA, 22 bp, Artificial Sequence
  chemically synthesized
aaagtcacgaaacagctggtga

SEQ ID NO: 67306 - DNA, 22 bp, Artificial Sequence
  chemically synthesized
gtgagtggcagagttggggttg

SEQ ID NO: 67307 - DNA, 22 bp, Artificial Sequence
  chemically synthesized
gggttgcagaacttaggttcct

SEQ ID NO: 67308 - DNA, 22 bp, Artificial Sequence
  chemically synthesized
cagaacttaggttcctgacttt

SEQ ID NO: 67309 - DNA, 22 bp, Artificial Sequence
  chemically synthesized
aggttcctgactttcctctagc

SEQ ID NO: 67310 - DNA, 22 bp, Artificial Sequence
  chemically synthesized
ggttcctgactttcctctagca

SEQ ID NO: 67311 - DNA, 22 bp, Artificial Sequence
  chemically synthesized
ctgactttcctctagcagtctc

SEQ ID NO: 67312 - DNA, 22 bp, Artificial Sequence
  chemically synthesized
actttcctctagcagtctctcc

SEQ ID NO: 67313 - DNA, 22 bp, Artificial Sequence
  chemically synthesized
tcctctagcagtctctccagag

SEQ ID NO: 67314 - DNA, 22 bp, Artificial Sequence
  chemically synthesized
cctctagcagtctctccagagg

SEQ ID NO: 67315 - DNA, 22 bp, Artificial Sequence
  chemically synthesized
ctctagcagtctctccagagga

SEQ ID NO: 67316 - DNA, 22 bp, Artificial Sequence
  chemically synthesized
tagcagtctctccagaggaaca

SEQ ID NO: 67317 - DNA, 22 bp, Artificial Sequence
  chemically synthesized
gcagtctctccagaggaacaag

SEQ ID NO: 67318 - DNA, 22 bp, Artificial Sequence
  chemically synthesized
tccagaggaacaagtccctgct

SEQ ID NO: 67319 - DNA, 22 bp, Artificial Sequence
  chemically synthesized
cagaggaacaagtccctgcttc

SEQ ID NO: 67320 - DNA, 22 bp, Artificial Sequence
  chemically synthesized
cttcctaaaggaagaaaagaat

SEQ ID NO: 67321 - DNA, 22 bp, Artificial Sequence
  chemically synthesized
cctaaaggaagaaaagaatccg

SEQ ID NO: 67322 - DNA, 22 bp, Artificial Sequence
  chemically synthesized
ctaaaggaagaaaagaatccgg

SEQ ID NO: 67323 - DNA, 22 bp, Artificial Sequence
  chemically synthesized
aaggaagaaaagaatccgggga

SEQ ID NO: 67324 - DNA, 22 bp, Artificial Sequence
  chemically synthesized
tgaaagtagctcccaaataacc

SEQ ID NO: 67325 - DNA, 22 bp, Artificial Sequence
  chemically synthesized
aaagtagctcccaaataacctg

SEQ ID NO: 67326 - DNA, 22 bp, Artificial Sequence
  chemically synthesized
ccaaataacctgataaatacct

SEQ ID NO: 67327 - DNA, 22 bp, Artificial Sequence
  chemically synthesized
ataaatacctcggatagaggca

SEQ ID NO: 67328 - DNA, 22 bp, Artificial Sequence
  chemically synthesized
ggatagaggcaaggctacaccc

SEQ ID NO: 67329 - DNA, 22 bp, Artificial Sequence
  chemically synthesized
cacccctccccctgcccccact

SEQ ID NO: 67330 - DNA, 22 bp, Artificial Sequence
  chemically synthesized
cccctgcccccactacacacaa

SEQ ID NO: 67331 - DNA, 22 bp, Artificial Sequence
  chemically synthesized
cccccactacacacaaacaaga

SEQ ID NO: 67332 - DNA, 22 bp, Artificial Sequence
  chemically synthesized
cacacaaacaagatcctcagct

SEQ ID NO: 67333 - DNA, 22 bp, Artificial Sequence
  chemically synthesized
agctgaggactcagagcaggag

SEQ ID NO: 67334 - DNA, 22 bp, Artificial Sequence
  chemically synthesized
aggactcagagcaggagtaagg

SEQ ID NO: 67335 - DNA, 22 bp, Artificial Sequence
  chemically synthesized
agagcaggagtaagggcacccc

SEQ ID NO: 67336 - DNA, 22 bp, Artificial Sequence
  chemically synthesized
tcctccccatggctttgaaaag

SEQ ID NO: 67337 - DNA, 22 bp, Artificial Sequence
  chemically synthesized
cccatggctttgaaaagaagaa

SEQ ID NO: 67338 - DNA, 22 bp, Artificial Sequence
  chemically synthesized
tgaaaagaagaaagaggggaaa

SEQ ID NO: 67339 - DNA, 22 bp, Artificial Sequence
  chemically synthesized
gaaaagaagaaagaggggaaat

SEQ ID NO: 67340 - DNA, 22 bp, Artificial Sequence
  chemically synthesized
aaaagaagaaagaggggaaatt

SEQ ID NO: 67341 - DNA, 22 bp, Artificial Sequence
  chemically synthesized
ggagggatggtcaagttgatga

SEQ ID NO: 67342 - DNA, 22 bp, Artificial Sequence
  chemically synthesized
gagggatggtcaagttgatgat

SEQ ID NO: 67343 - DNA, 22 bp, Artificial Sequence
  chemically synthesized
atgattgaagagacaaagtagt

SEQ ID NO: 67344 - DNA, 22 bp, Artificial Sequence
  chemically synthesized
aagagacaaagtagtgtaggaa

SEQ ID NO: 67345 - DNA, 22 bp, Artificial Sequence
  chemically synthesized
aatgtttcttgcacagtcattt

SEQ ID NO: 67346 - DNA, 22 bp, Artificial Sequence
  chemically synthesized
cttgcacagtcatttgttgaaa

SEQ ID NO: 67347 - DNA, 22 bp, Artificial Sequence
  chemically synthesized
ttgcacagtcatttgttgaaaa

SEQ ID NO: 67348 - DNA, 22 bp, Artificial Sequence
  chemically synthesized
gcacagtcatttgttgaaaatg

SEQ ID NO: 67349 - DNA, 22 bp, Artificial Sequence
  chemically synthesized
cacagtcatttgttgaaaatgt

SEQ ID NO: 67350 - DNA, 22 bp, Artificial Sequence
  chemically synthesized
gttgaaaatgtgtcagcaagta

SEQ ID NO: 67351 - DNA, 22 bp, Artificial Sequence
  chemically synthesized
ttgaaaatgtgtcagcaagtac

SEQ ID NO: 67352 - DNA, 22 bp, Artificial Sequence
  chemically synthesized
aaaatgtgtcagcaagtacaag

SEQ ID NO: 67353 - DNA, 22 bp, Artificial Sequence
  chemically synthesized
aaactggcaatgagacatctga

SEQ ID NO: 67354 - DNA, 22 bp, Artificial Sequence
  chemically synthesized
aactggcaatgagacatctgaa

SEQ ID NO: 67355 - DNA, 22 bp, Artificial Sequence
  chemically synthesized
gcaatgagacatctgaaataga

SEQ ID NO: 67356 - DNA, 22 bp, Artificial Sequence
  chemically synthesized
aaatagattatttaagccaggg

SEQ ID NO: 67357 - DNA, 22 bp, Artificial Sequence
  chemically synthesized
tttaagccagggaggcagtatt

SEQ ID NO: 67358 - DNA, 22 bp, Artificial Sequence
  chemically synthesized
aagccagggaggcagtattgca

SEQ ID NO: 67359 - DNA, 22 bp, Artificial Sequence
  chemically synthesized
agccagggaggcagtattgcaa

SEQ ID NO: 67360 - DNA, 22 bp, Artificial Sequence
  chemically synthesized
caaggaagaacatggctatcaa

SEQ ID NO: 67361 - DNA, 22 bp, Artificial Sequence
  chemically synthesized
tcaacacttgtttgtctgactc

SEQ ID NO: 67362 - DNA, 22 bp, Artificial Sequence
  chemically synthesized
gtttgtctgactcagaggaata

SEQ ID NO: 67363 - DNA, 22 bp, Artificial Sequence
  chemically synthesized
tttgtctgactcagaggaataa

SEQ ID NO: 67364 - DNA, 22 bp, Artificial Sequence
  chemically synthesized
gtctgactcagaggaataaaac

SEQ ID NO: 67365 - DNA, 22 bp, Artificial Sequence
  chemically synthesized
tctgactcagaggaataaaaca

SEQ ID NO: 67366 - DNA, 22 bp, Artificial Sequence
  chemically synthesized
actcagaggaataaaacatagt

SEQ ID NO: 67367 - DNA, 22 bp, Artificial Sequence
  chemically synthesized
agaggaataaaacatagtaaat

SEQ ID NO: 67368 - DNA, 22 bp, Artificial Sequence
  chemically synthesized
tgccttagcgggccacccacat

SEQ ID NO: 67369 - DNA, 22 bp, Artificial Sequence
  chemically synthesized
gccttagcgggccacccacatt

SEQ ID NO: 67370 - DNA, 22 bp, Artificial Sequence
  chemically synthesized
ccttagcgggccacccacattc

SEQ ID NO: 67371 - DNA, 22 bp, Artificial Sequence
  chemically synthesized
agcgggccacccacattcattg

SEQ ID NO: 67372 - DNA, 22 bp, Artificial Sequence
  chemically synthesized
gcgggccacccacattcattgg

SEQ ID NO: 67373 - DNA, 22 bp, Artificial Sequence
  chemically synthesized
attgggggaagaaacaattgag

SEQ ID NO: 67374 - DNA, 22 bp, Artificial Sequence
  chemically synthesized
ggggaagaaacaattgaggtgg

SEQ ID NO: 67375 - DNA, 22 bp, Artificial Sequence
  chemically synthesized
aggtggggggaaaacagaacag

SEQ ID NO: 67376 - DNA, 22 bp, Artificial Sequence
  chemically synthesized
catggagtttcacaagagtcca

SEQ ID NO: 67377 - DNA, 22 bp, Artificial Sequence
  chemically synthesized
atggagtttcacaagagtccac

SEQ ID NO: 67378 - DNA, 22 bp, Artificial Sequence
  chemically synthesized
cacaagagtccacatggttgtg

SEQ ID NO: 67379 - DNA, 22 bp, Artificial Sequence
  chemically synthesized
acaagagtccacatggttgtgt

SEQ ID NO: 67380 - DNA, 22 bp, Artificial Sequence
  chemically synthesized
tgtcccttattttcagaaaatg

SEQ ID NO: 67381 - DNA, 22 bp, Artificial Sequence
  chemically synthesized
attttcagaaaatgtgaaattg

SEQ ID NO: 67382 - DNA, 22 bp, Artificial Sequence
  chemically synthesized
ttttcagaaaatgtgaaattgg

SEQ ID NO: 67383 - DNA, 22 bp, Artificial Sequence
  chemically synthesized
tcagaaaatgtgaaattggaaa

SEQ ID NO: 67384 - DNA, 22 bp, Artificial Sequence
  chemically synthesized
cagaaaatgtgaaattggaaaa

SEQ ID NO: 67385 - DNA, 22 bp, Artificial Sequence
  chemically synthesized
agaaaatgtgaaattggaaaat

SEQ ID NO: 67386 - DNA, 22 bp, Artificial Sequence
  chemically synthesized
gaaaatacgcacttgtgaaagc

SEQ ID NO: 67387 - DNA, 22 bp, Artificial Sequence
  chemically synthesized
gtgaaagctgaagatgtcacag

SEQ ID NO: 67388 - DNA, 22 bp, Artificial Sequence
  chemically synthesized
tgaaagctgaagatgtcacaga

SEQ ID NO: 67389 - DNA, 22 bp, Artificial Sequence
  chemically synthesized
aagatgtcacagaaatcttcag

SEQ ID NO: 67390 - DNA, 22 bp, Artificial Sequence
  chemically synthesized
cagaggatttatttagatggtc

SEQ ID NO: 67391 - DNA, 22 bp, Artificial Sequence
  chemically synthesized
agaggatttatttagatggtcg

SEQ ID NO: 67392 - DNA, 22 bp, Artificial Sequence
  chemically synthesized
atttagatggtcgtatcctccg

SEQ ID NO: 67393 - DNA, 22 bp, Artificial Sequence
  chemically synthesized
tttagatggtcgtatcctccgc

SEQ ID NO: 67394 - DNA, 22 bp, Artificial Sequence
  chemically synthesized
agatggtcgtatcctccgctgt

SEQ ID NO: 67395 - DNA, 22 bp, Artificial Sequence
  chemically synthesized
gatggtcgtatcctccgctgtc

SEQ ID NO: 67396 - DNA, 22 bp, Artificial Sequence
  chemically synthesized
cgctgtcaactggatgaatcag

SEQ ID NO: 67397 - DNA, 22 bp, Artificial Sequence
  chemically synthesized
tcaactggatgaatcagtgtgc

SEQ ID NO: 67398 - DNA, 22 bp, Artificial Sequence
  chemically synthesized
gatgaatcagtgtgcaatattt

SEQ ID NO: 67399 - DNA, 22 bp, Artificial Sequence
  chemically synthesized
tgatgtgaatgtaaccgcctat

SEQ ID NO: 67400 - DNA, 22 bp, Artificial Sequence
  chemically synthesized
gatgtgaatgtaaccgcctatt

SEQ ID NO: 67401 - DNA, 22 bp, Artificial Sequence
  chemically synthesized
atgtgaatgtaaccgcctattg

SEQ ID NO: 67402 - DNA, 22 bp, Artificial Sequence
  chemically synthesized
ttgggccccatttactctgtgc

SEQ ID NO: 67403 - DNA, 22 bp, Artificial Sequence
  chemically synthesized
ggccccatttactctgtgccca

SEQ ID NO: 67404 - DNA, 22 bp, Artificial Sequence
  chemically synthesized
actctgtgcccaccttgggctt

SEQ ID NO: 67405 - DNA, 22 bp, Artificial Sequence
  chemically synthesized
ctctgtgcccaccttgggcttt

SEQ ID NO: 67406 - DNA, 22 bp, Artificial Sequence
  chemically synthesized
tgtgcccaccttgggctttgct

SEQ ID NO: 67407 - DNA, 22 bp, Artificial Sequence
  chemically synthesized
tgcccaccttgggctttgcttc

SEQ ID NO: 67408 - DNA, 22 bp, Artificial Sequence
  chemically synthesized
gggctttgcttctctctaagca

SEQ ID NO: 67409 - DNA, 22 bp, Artificial Sequence
  chemically synthesized
ggctttgcttctctctaagcat

SEQ ID NO: 67410 - DNA, 22 bp, Artificial Sequence
  chemically synthesized
tgcttctctctaagcatcttta

SEQ ID NO: 67411 - DNA, 22 bp, Artificial Sequence
  chemically synthesized
gcttctctctaagcatctttac

SEQ ID NO: 67412 - DNA, 22 bp, Artificial Sequence
  chemically synthesized
cttctctctaagcatctttacc

SEQ ID NO: 67413 - DNA, 22 bp, Artificial Sequence
  chemically synthesized
ctctctaagcatctttacctgc

SEQ ID NO: 67414 - DNA, 22 bp, Artificial Sequence
  chemically synthesized
tctctaagcatctttacctgct

SEQ ID NO: 67415 - DNA, 22 bp, Artificial Sequence
  chemically synthesized
tctaagcatctttacctgcttt

SEQ ID NO: 67416 - DNA, 22 bp, Artificial Sequence
  chemically synthesized
taagcatctttacctgcttttt

SEQ ID NO: 67417 - DNA, 22 bp, Artificial Sequence
  chemically synthesized
agcatctttacctgctttttct

SEQ ID NO: 67418 - DNA, 22 bp, Artificial Sequence
  chemically synthesized
tacctgctttttctttttatct

SEQ ID NO: 67419 - DNA, 22 bp, Artificial Sequence
  chemically synthesized
acctgctttttctttttatcta

SEQ ID NO: 67420 - DNA, 22 bp, Artificial Sequence
  chemically synthesized
cctgctttttctttttatctag

SEQ ID NO: 67421 - DNA, 22 bp, Artificial Sequence
  chemically synthesized
ctttttctttttatctaggata

SEQ ID NO: 67422 - DNA, 22 bp, Artificial Sequence
  chemically synthesized
tttctttttatctaggatatcc

SEQ ID NO: 67423 - DNA, 22 bp, Artificial Sequence
  chemically synthesized
ttctttttatctaggatatcct

SEQ ID NO: 67424 - DNA, 22 bp, Artificial Sequence
  chemically synthesized
tctttttatctaggatatcctt

SEQ ID NO: 67425 - DNA, 22 bp, Artificial Sequence
  chemically synthesized
ctttttatctaggatatccttt

SEQ ID NO: 67426 - DNA, 22 bp, Artificial Sequence
  chemically synthesized
tttttatctaggatatcctttc

SEQ ID NO: 67427 - DNA, 22 bp, Artificial Sequence
  chemically synthesized
tttatctaggatatcctttctc

SEQ ID NO: 67428 - DNA, 22 bp, Artificial Sequence
  chemically synthesized
ttatctaggatatcctttctct

SEQ ID NO: 67429 - DNA, 22 bp, Artificial Sequence
  chemically synthesized
tatctaggatatcctttctctt

SEQ ID NO: 67430 - DNA, 22 bp, Artificial Sequence
  chemically synthesized
atctaggatatcctttctcttg

SEQ ID NO: 67431 - DNA, 22 bp, Artificial Sequence
  chemically synthesized
tctaggatatcctttctcttgg

SEQ ID NO: 67432 - DNA, 22 bp, Artificial Sequence
  chemically synthesized
ggatatcctttctcttggctct

SEQ ID NO: 67433 - DNA, 22 bp, Artificial Sequence
  chemically synthesized
tctcttggctctccaggtttaa

SEQ ID NO: 67434 - DNA, 22 bp, Artificial Sequence
  chemically synthesized
ctcttggctctccaggtttaac

SEQ ID NO: 67435 - DNA, 22 bp, Artificial Sequence
  chemically synthesized
tcttggctctccaggtttaact

SEQ ID NO: 67436 - DNA, 22 bp, Artificial Sequence
  chemically synthesized
ttggctctccaggtttaactca

SEQ ID NO: 67437 - DNA, 22 bp, Artificial Sequence
  chemically synthesized
ggctctccaggtttaactcata

SEQ ID NO: 67438 - DNA, 22 bp, Artificial Sequence
  chemically synthesized
gctctccaggtttaactcataa

SEQ ID NO: 67439 - DNA, 22 bp, Artificial Sequence
  chemically synthesized
tccaggtttaactcataagttt

SEQ ID NO: 67440 - DNA, 22 bp, Artificial Sequence
  chemically synthesized
caggtttaactcataagttttc

SEQ ID NO: 67441 - DNA, 22 bp, Artificial Sequence
  chemically synthesized
aactcataagttttcctctttc

SEQ ID NO: 67442 - DNA, 22 bp, Artificial Sequence
  chemically synthesized
actcataagttttcctctttcc

SEQ ID NO: 67443 - DNA, 22 bp, Artificial Sequence
  chemically synthesized
ataagttttcctctttcccaaa

SEQ ID NO: 67444 - DNA, 22 bp, Artificial Sequence
  chemically synthesized
tcctctttcccaaagcctctct

SEQ ID NO: 67445 - DNA, 22 bp, Artificial Sequence
  chemically synthesized
cctctttcccaaagcctctctc

SEQ ID NO: 67446 - DNA, 22 bp, Artificial Sequence
  chemically synthesized
ctctttcccaaagcctctctcc

SEQ ID NO: 67447 - DNA, 22 bp, Artificial Sequence
  chemically synthesized
tttcccaaagcctctctccctc

SEQ ID NO: 67448 - DNA, 22 bp, Artificial Sequence
  chemically synthesized
tcccaaagcctctctccctccc

SEQ ID NO: 67449 - DNA, 22 bp, Artificial Sequence
  chemically synthesized
cccaaagcctctctccctccct

SEQ ID NO: 67450 - DNA, 22 bp, Artificial Sequence
  chemically synthesized
ccaaagcctctctccctccctt

SEQ ID NO: 67451 - DNA, 22 bp, Artificial Sequence
  chemically synthesized
tctccctcccttccaaatggaa

SEQ ID NO: 67452 - DNA, 22 bp, Artificial Sequence
  chemically synthesized
tccctcccttccaaatggaaat

SEQ ID NO: 67453 - DNA, 22 bp, Artificial Sequence
  chemically synthesized
cctcccttccaaatggaaataa

SEQ ID NO: 67454 - DNA, 22 bp, Artificial Sequence
  chemically synthesized
ccttccaaatggaaataatttc

SEQ ID NO: 67455 - DNA, 22 bp, Artificial Sequence
  chemically synthesized
ccaaatggaaataatttctctt

SEQ ID NO: 67456 - DNA, 22 bp, Artificial Sequence
  chemically synthesized
caaatggaaataatttctcttc

SEQ ID NO: 67457 - DNA, 22 bp, Artificial Sequence
  chemically synthesized
ctcttcctttgaatttccatag

SEQ ID NO: 67458 - DNA, 22 bp, Artificial Sequence
  chemically synthesized
tcttcctttgaatttccatagc

SEQ ID NO: 67459 - DNA, 22 bp, Artificial Sequence
  chemically synthesized
ttcctttgaatttccatagcag

SEQ ID NO: 67460 - DNA, 22 bp, Artificial Sequence
  chemically synthesized
cctttgaatttccatagcagct

SEQ ID NO: 67461 - DNA, 22 bp, Artificial Sequence
  chemically synthesized
ctttgaatttccatagcagctc

SEQ ID NO: 67462 - DNA, 22 bp, Artificial Sequence
  chemically synthesized
tgaatttccatagcagctcatc

SEQ ID NO: 67463 - DNA, 22 bp, Artificial Sequence
  chemically synthesized
gaatttccatagcagctcatct

SEQ ID NO: 67464 - DNA, 22 bp, Artificial Sequence
  chemically synthesized
aatttccatagcagctcatctg

SEQ ID NO: 67465 - DNA, 22 bp, Artificial Sequence
  chemically synthesized
ccatagcagctcatctgtacct

SEQ ID NO: 67466 - DNA, 22 bp, Artificial Sequence
  chemically synthesized
catagcagctcatctgtacctc

SEQ ID NO: 67467 - DNA, 22 bp, Artificial Sequence
  chemically synthesized
atctgtacctctctcatgacac

SEQ ID NO: 67468 - DNA, 22 bp, Artificial Sequence
  chemically synthesized
tacctctctcatgacacacttt

SEQ ID NO: 67469 - DNA, 22 bp, Artificial Sequence
  chemically synthesized
tctcatgacacactttctacat

SEQ ID NO: 67470 - DNA, 22 bp, Artificial Sequence
  chemically synthesized
tcatgacacactttctacatgg

SEQ ID NO: 67471 - DNA, 22 bp, Artificial Sequence
  chemically synthesized
atgacacactttctacatgggg

SEQ ID NO: 67472 - DNA, 22 bp, Artificial Sequence
  chemically synthesized
tctacatgggggtagagcaatt

SEQ ID NO: 67473 - DNA, 22 bp, Artificial Sequence
  chemically synthesized
ctacatgggggtagagcaattt

SEQ ID NO: 67474 - DNA, 22 bp, Artificial Sequence
  chemically synthesized
tacatgggggtagagcaatttc

SEQ ID NO: 67475 - DNA, 22 bp, Artificial Sequence
  chemically synthesized
catgggggtagagcaatttctg

SEQ ID NO: 67476 - DNA, 22 bp, Artificial Sequence
  chemically synthesized
ctgtgcaggccttaccttttct

SEQ ID NO: 67477 - DNA, 22 bp, Artificial Sequence
  chemically synthesized
tgtgcaggccttaccttttcta

SEQ ID NO: 67478 - DNA, 22 bp, Artificial Sequence
  chemically synthesized
tgcaggccttaccttttctact

SEQ ID NO: 67479 - DNA, 22 bp, Artificial Sequence
  chemically synthesized
accttttctactaaatgaagcc

SEQ ID NO: 67480 - DNA, 22 bp, Artificial Sequence
  chemically synthesized
ccttttctactaaatgaagcct

SEQ ID NO: 67481 - DNA, 22 bp, Artificial Sequence
  chemically synthesized
ttctactaaatgaagcctgctg

SEQ ID NO: 67482 - DNA, 22 bp, Artificial Sequence
  chemically synthesized
tctactaaatgaagcctgctgt

SEQ ID NO: 67483 - DNA, 22 bp, Artificial Sequence
  chemically synthesized
ctactaaatgaagcctgctgtg

SEQ ID NO: 67484 - DNA, 22 bp, Artificial Sequence
  chemically synthesized
tactaaatgaagcctgctgtgg

SEQ ID NO: 67485 - DNA, 22 bp, Artificial Sequence
  chemically synthesized
ctaaatgaagcctgctgtggga

SEQ ID NO: 67486 - DNA, 22 bp, Artificial Sequence
  chemically synthesized
aatgaagcctgctgtgggagaa

SEQ ID NO: 67487 - DNA, 22 bp, Artificial Sequence
  chemically synthesized
ctgtgggagaaatctgtgtccg

SEQ ID NO: 67488 - DNA, 22 bp, Artificial Sequence
  chemically synthesized
tgggagaaatctgtgtccgtgt

SEQ ID NO: 67489 - DNA, 22 bp, Artificial Sequence
  chemically synthesized
tgtccgtgttttctttgtactg

SEQ ID NO: 67490 - DNA, 22 bp, Artificial Sequence
  chemically synthesized
tctttgtactgcccacagcggc

SEQ ID NO: 67491 - DNA, 22 bp, Artificial Sequence
  chemically synthesized
ctttgtactgcccacagcggct

SEQ ID NO: 67492 - DNA, 22 bp, Artificial Sequence
  chemically synthesized
tttgtactgcccacagcggcta

SEQ ID NO: 67493 - DNA, 22 bp, Artificial Sequence
  chemically synthesized
tgtactgcccacagcggctagc

SEQ ID NO: 67494 - DNA, 22 bp, Artificial Sequence
  chemically synthesized
gtactgcccacagcggctagcc

SEQ ID NO: 67495 - DNA, 22 bp, Artificial Sequence
  chemically synthesized
tactgcccacagcggctagccc

SEQ ID NO: 67496 - DNA, 22 bp, Artificial Sequence
  chemically synthesized
cccacagcggctagcccattgc

SEQ ID NO: 67497 - DNA, 22 bp, Artificial Sequence
  chemically synthesized
gcccattgctttgggcattgta

SEQ ID NO: 67498 - DNA, 22 bp, Artificial Sequence
  chemically synthesized
ctttgggcattgtaggcactcg

SEQ ID NO: 67499 - DNA, 22 bp, Artificial Sequence
  chemically synthesized
tgggcattgtaggcactcggta

SEQ ID NO: 67500 - DNA, 22 bp, Artificial Sequence
  chemically synthesized
gggcattgtaggcactcggtaa

SEQ ID NO: 67501 - DNA, 22 bp, Artificial Sequence
  chemically synthesized
ggcattgtaggcactcggtaaa

SEQ ID NO: 67502 - DNA, 22 bp, Artificial Sequence
  chemically synthesized
taggcactcggtaaatatttgt

SEQ ID NO: 67503 - DNA, 22 bp, Artificial Sequence
  chemically synthesized
ggtaaatatttgttgaatgaat

SEQ ID NO: 67504 - DNA, 22 bp, Artificial Sequence
  chemically synthesized
gttgaatgaatgcatgagaggt

SEQ ID NO: 67505 - DNA, 22 bp, Artificial Sequence
  chemically synthesized
ttgaatgaatgcatgagaggtt

SEQ ID NO: 67506 - DNA, 22 bp, Artificial Sequence
  chemically synthesized
aatgaatgcatgagaggttgaa

SEQ ID NO: 67507 - DNA, 22 bp, Artificial Sequence
  chemically synthesized
aatgaatgcatgagagaatgaa

SEQ ID NO: 67508 - DNA, 22 bp, Artificial Sequence
  chemically synthesized
atcctgggaacacacattttgc

SEQ ID NO: 67509 - DNA, 22 bp, Artificial Sequence
  chemically synthesized
tcctgggaacacacattttgca

SEQ ID NO: 67510 - DNA, 22 bp, Artificial Sequence
  chemically synthesized
ggaacacacattttgcatagtg

SEQ ID NO: 67511 - DNA, 22 bp, Artificial Sequence
  chemically synthesized
tgcatagtgaggtatgtgatta

SEQ ID NO: 67512 - DNA, 22 bp, Artificial Sequence
  chemically synthesized
gcatagtgaggtatgtgattaa

SEQ ID NO: 67513 - DNA, 22 bp, Artificial Sequence
  chemically synthesized
catagtgaggtatgtgattaaa

SEQ ID NO: 67514 - DNA, 22 bp, Artificial Sequence
  chemically synthesized
aacaaacaaaaaaaaattgtcc

SEQ ID NO: 67515 - DNA, 22 bp, Artificial Sequence
  chemically synthesized
tcctaagacaatttgtcttttt

SEQ ID NO: 67516 - DNA, 22 bp, Artificial Sequence
  chemically synthesized
agacaatttgtctttttatgca

SEQ ID NO: 67517 - DNA, 22 bp, Artificial Sequence
  chemically synthesized
gtctttttatgcagctgccctc

SEQ ID NO: 67518 - DNA, 22 bp, Artificial Sequence
  chemically synthesized
tctttttatgcagctgccctct

SEQ ID NO: 67519 - DNA, 22 bp, Artificial Sequence
  chemically synthesized
tttatgcagctgccctctcagt

SEQ ID NO: 67520 - DNA, 22 bp, Artificial Sequence
  chemically synthesized
ttatgcagctgccctctcagtc

SEQ ID NO: 67521 - DNA, 22 bp, Artificial Sequence
  chemically synthesized
tatgcagctgccctctcagtct

SEQ ID NO: 67522 - DNA, 22 bp, Artificial Sequence
  chemically synthesized
atgcagctgccctctcagtctc

SEQ ID NO: 67523 - DNA, 22 bp, Artificial Sequence
  chemically synthesized
tgcagctgccctctcagtctcc

SEQ ID NO: 67524 - DNA, 22 bp, Artificial Sequence
  chemically synthesized
ccctctcagtctcctagataag

SEQ ID NO: 67525 - DNA, 22 bp, Artificial Sequence
  chemically synthesized
tcagtctcctagataagttccg

SEQ ID NO: 67526 - DNA, 22 bp, Artificial Sequence
  chemically synthesized
agtctcctagataagttccgcc

SEQ ID NO: 67527 - DNA, 22 bp, Artificial Sequence
  chemically synthesized
ctagataagttccgccattcta

SEQ ID NO: 67528 - DNA, 22 bp, Artificial Sequence
  chemically synthesized
gataagttccgccattctaagg

SEQ ID NO: 67529 - DNA, 22 bp, Artificial Sequence
  chemically synthesized
cgccattctaaggcaaaagctt

SEQ ID NO: 67530 - DNA, 22 bp, Artificial Sequence
  chemically synthesized
taaggcaaaagcttaaagtgta

SEQ ID NO: 67531 - DNA, 22 bp, Artificial Sequence
  chemically synthesized
aggcaaaagcttaaagtgtaat

SEQ ID NO: 67532 - DNA, 22 bp, Artificial Sequence
  chemically synthesized
aaagtgtaataaaaatttatct

SEQ ID NO: 67533 - DNA, 22 bp, Artificial Sequence
  chemically synthesized
aagtgtaataaaaatttatcta

SEQ ID NO: 67534 - DNA, 22 bp, Artificial Sequence
  chemically synthesized
atctaattcacgatcaagtgaa

SEQ ID NO: 67535 - DNA, 22 bp, Artificial Sequence
  chemically synthesized
tctaattcacgatcaagtgaaa

SEQ ID NO: 67536 - DNA, 22 bp, Artificial Sequence
  chemically synthesized
attcacgatcaagtgaaaatac

SEQ ID NO: 67537 - DNA, 22 bp, Artificial Sequence
  chemically synthesized
acgatcaagtgaaaatactttg

SEQ ID NO: 67538 - DNA, 22 bp, Artificial Sequence
  chemically synthesized
tgggcccagagccaaagaatat

SEQ ID NO: 67539 - DNA, 22 bp, Artificial Sequence
  chemically synthesized
gggcccagagccaaagaatatt

SEQ ID NO: 67540 - DNA, 22 bp, Artificial Sequence
  chemically synthesized
ggcccagagccaaagaatatta

SEQ ID NO: 67541 - DNA, 22 bp, Artificial Sequence
  chemically synthesized
ttggagtgaactttttttaaca

SEQ ID NO: 67542 - DNA, 22 bp, Artificial Sequence
  chemically synthesized
gagtgaactttttttaacaccc

SEQ ID NO: 67543 - DNA, 22 bp, Artificial Sequence
  chemically synthesized
tttttaacaccctaaatttaac

SEQ ID NO: 67544 - DNA, 22 bp, Artificial Sequence
  chemically synthesized
ttttaacaccctaaatttaacc

SEQ ID NO: 67545 - DNA, 22 bp, Artificial Sequence
  chemically synthesized
tttaacaccctaaatttaacca

SEQ ID NO: 67546 - DNA, 22 bp, Artificial Sequence
  chemically synthesized
ttaacaccctaaatttaaccag

SEQ ID NO: 67547 - DNA, 22 bp, Artificial Sequence
  chemically synthesized
taacaccctaaatttaaccagc

SEQ ID NO: 67548 - DNA, 22 bp, Artificial Sequence
  chemically synthesized
aacaccctaaatttaaccagct

SEQ ID NO: 67549 - DNA, 22 bp, Artificial Sequence
  chemically synthesized
acaccctaaatttaaccagctg

SEQ ID NO: 67550 - DNA, 22 bp, Artificial Sequence
  chemically synthesized
aatttaaccagctggaattctt

SEQ ID NO: 67551 - DNA, 22 bp, Artificial Sequence
  chemically synthesized
aaccagctggaattcttttttt

SEQ ID NO: 67552 - DNA, 22 bp, Artificial Sequence
  chemically synthesized
accagctggaattcttttttta

SEQ ID NO: 67553 - DNA, 22 bp, Artificial Sequence
  chemically synthesized
gaattctttttttaagtaccat

SEQ ID NO: 67554 - DNA, 22 bp, Artificial Sequence
  chemically synthesized
tttttttaagtaccatcctatt

SEQ ID NO: 67555 - DNA, 22 bp, Artificial Sequence
  chemically synthesized
tttttaagtaccatcctattca

SEQ ID NO: 67556 - DNA, 22 bp, Artificial Sequence
  chemically synthesized
ttttaagtaccatcctattcaa

SEQ ID NO: 67557 - DNA, 22 bp, Artificial Sequence
  chemically synthesized
tttaagtaccatcctattcaac

SEQ ID NO: 67558 - DNA, 22 bp, Artificial Sequence
  chemically synthesized
ttaagtaccatcctattcaacc

SEQ ID NO: 67559 - DNA, 22 bp, Artificial Sequence
  chemically synthesized
taagtaccatcctattcaacct

SEQ ID NO: 67560 - DNA, 22 bp, Artificial Sequence
  chemically synthesized
aagtaccatcctattcaacctt

SEQ ID NO: 67561 - DNA, 22 bp, Artificial Sequence
  chemically synthesized
agtaccatcctattcaaccttt

SEQ ID NO: 67562 - DNA, 22 bp, Artificial Sequence
  chemically synthesized
ttcaaccttttgaaatgaagga

SEQ ID NO: 67563 - DNA, 22 bp, Artificial Sequence
  chemically synthesized
aaccttttgaaatgaaggattt

SEQ ID NO: 67564 - DNA, 22 bp, Artificial Sequence
  chemically synthesized
ttgaaatgaaggatttgccttt

SEQ ID NO: 67565 - DNA, 22 bp, Artificial Sequence
  chemically synthesized
tgaaatgaaggatttgcctttt

SEQ ID NO: 67566 - DNA, 22 bp, Artificial Sequence
  chemically synthesized
gaaatgaaggatttgcctttta

SEQ ID NO: 67567 - DNA, 22 bp, Artificial Sequence
  chemically synthesized
aaatgaaggatttgccttttag

SEQ ID NO: 67568 - DNA, 22 bp, Artificial Sequence
  chemically synthesized
gccttttagtgggaaatctgca

SEQ ID NO: 67569 - DNA, 22 bp, Artificial Sequence
  chemically synthesized
ccttttagtgggaaatctgcat

SEQ ID NO: 67570 - DNA, 22 bp, Artificial Sequence
  chemically synthesized
ttagtgggaaatctgcatttca

SEQ ID NO: 67571 - DNA, 22 bp, Artificial Sequence
  chemically synthesized
tagtgggaaatctgcatttcaa

SEQ ID NO: 67572 - DNA, 22 bp, Artificial Sequence
  chemically synthesized
agtgggaaatctgcatttcaac

SEQ ID NO: 67573 - DNA, 22 bp, Artificial Sequence
  chemically synthesized
gtgggaaatctgcatttcaaca

SEQ ID NO: 67574 - DNA, 22 bp, Artificial Sequence
  chemically synthesized
catttcaacacaaagatggaac

SEQ ID NO: 67575 - DNA, 22 bp, Artificial Sequence
  chemically synthesized
caacacaaagatggaacacaat

SEQ ID NO: 67576 - DNA, 22 bp, Artificial Sequence
  chemically synthesized
aacacaaagatggaacacaatg

SEQ ID NO: 67577 - DNA, 22 bp, Artificial Sequence
  chemically synthesized
tggcttagttgcttttcagaaa

SEQ ID NO: 67578 - DNA, 22 bp, Artificial Sequence
  chemically synthesized
ggcttagttgcttttcagaaaa

SEQ ID NO: 67579 - DNA, 22 bp, Artificial Sequence
  chemically synthesized
gcttagttgcttttcagaaaag

SEQ ID NO: 67580 - DNA, 22 bp, Artificial Sequence
  chemically synthesized
agttgcttttcagaaaagcaag

SEQ ID NO: 67581 - DNA, 22 bp, Artificial Sequence
  chemically synthesized
gttgcttttcagaaaagcaaga

SEQ ID NO: 67582 - DNA, 22 bp, Artificial Sequence
  chemically synthesized
cttttcagaaaagcaagatttt

SEQ ID NO: 67583 - DNA, 22 bp, Artificial Sequence
  chemically synthesized
ttcagaaaagcaagattttttt

SEQ ID NO: 67584 - DNA, 22 bp, Artificial Sequence
  chemically synthesized
tcagaaaagcaagatttttttt

SEQ ID NO: 67585 - DNA, 22 bp, Artificial Sequence
  chemically synthesized
cagaaaagcaagattttttttt

SEQ ID NO: 67586 - DNA, 22 bp, Artificial Sequence
  chemically synthesized
agaaaagcaagatttttttttt

SEQ ID NO: 67587 - DNA, 22 bp, Artificial Sequence
  chemically synthesized
tttttttttggaattatatgct

SEQ ID NO: 67588 - DNA, 22 bp, Artificial Sequence
  chemically synthesized
ttttttttggaattatatgctt

SEQ ID NO: 67589 - DNA, 22 bp, Artificial Sequence
  chemically synthesized
tttttttggaattatatgcttt

SEQ ID NO: 67590 - DNA, 22 bp, Artificial Sequence
  chemically synthesized
ttttttggaattatatgctttg

SEQ ID NO: 67591 - DNA, 22 bp, Artificial Sequence
  chemically synthesized
tttttggaattatatgctttgc

SEQ ID NO: 67592 - DNA, 22 bp, Artificial Sequence
  chemically synthesized
ttttggaattatatgctttgct

SEQ ID NO: 67593 - DNA, 22 bp, Artificial Sequence
  chemically synthesized
tttggaattatatgctttgctt

SEQ ID NO: 67594 - DNA, 22 bp, Artificial Sequence
  chemically synthesized
ttggaattatatgctttgctta

SEQ ID NO: 67595 - DNA, 22 bp, Artificial Sequence
  chemically synthesized
tggaattatatgctttgcttat

SEQ ID NO: 67596 - DNA, 22 bp, Artificial Sequence
  chemically synthesized
ggaattatatgctttgcttatg

SEQ ID NO: 67597 - DNA, 22 bp, Artificial Sequence
  chemically synthesized
gaattatatgctttgcttatgt

SEQ ID NO: 67598 - DNA, 22 bp, Artificial Sequence
  chemically synthesized
tatgctttgcttatgttaaaga

SEQ ID NO: 67599 - DNA, 22 bp, Artificial Sequence
  chemically synthesized
tgcttatgttaaagacacagct

SEQ ID NO: 67600 - DNA, 22 bp, Artificial Sequence
  chemically synthesized
gcttatgttaaagacacagctt

SEQ ID NO: 67601 - DNA, 22 bp, Artificial Sequence
  chemically synthesized
cttatgttaaagacacagcttg

SEQ ID NO: 67602 - DNA, 22 bp, Artificial Sequence
  chemically synthesized
atgttaaagacacagcttgcag

SEQ ID NO: 67603 - DNA, 22 bp, Artificial Sequence
  chemically synthesized
tgttaaagacacagcttgcaga

SEQ ID NO: 67604 - DNA, 22 bp, Artificial Sequence
  chemically synthesized
aagacacagcttgcagaaaaat

SEQ ID NO: 67605 - DNA, 22 bp, Artificial Sequence
  chemically synthesized
gcagaaaaattttgtttaggcc

SEQ ID NO: 67606 - DNA, 22 bp, Artificial Sequence
  chemically synthesized
cagaaaaattttgtttaggcct

SEQ ID NO: 67607 - DNA, 22 bp, Artificial Sequence
  chemically synthesized
tgtttaggcctgacagattggt

SEQ ID NO: 67608 - DNA, 22 bp, Artificial Sequence
  chemically synthesized
gtttaggcctgacagattggtg

SEQ ID NO: 67609 - DNA, 22 bp, Artificial Sequence
  chemically synthesized
tttaggcctgacagattggtgg

SEQ ID NO: 67610 - DNA, 22 bp, Artificial Sequence
  chemically synthesized
aggcctgacagattggtggctg

SEQ ID NO: 67611 - DNA, 22 bp, Artificial Sequence
  chemically synthesized
ggcctgacagattggtggctgg

SEQ ID NO: 67612 - DNA, 22 bp, Artificial Sequence
  chemically synthesized
acagattggtggctggcatttt

SEQ ID NO: 67613 - DNA, 22 bp, Artificial Sequence
  chemically synthesized
gtggctggcatttttatagata

SEQ ID NO: 67614 - DNA, 22 bp, Artificial Sequence
  chemically synthesized
gcatttttatagataaaggggc

SEQ ID NO: 67615 - DNA, 22 bp, Artificial Sequence
  chemically synthesized
ttatagataaaggggcacgcaa

SEQ ID NO: 67616 - DNA, 22 bp, Artificial Sequence
  chemically synthesized
tatagataaaggggcacgcaaa

SEQ ID NO: 67617 - DNA, 22 bp, Artificial Sequence
  chemically synthesized
atagataaaggggcacgcaaaa

SEQ ID NO: 67618 - DNA, 22 bp, Artificial Sequence
  chemically synthesized
tagataaaggggcacgcaaaat

SEQ ID NO: 67619 - DNA, 22 bp, Artificial Sequence
  chemically synthesized
tacttcctccctttattgagaa

SEQ ID NO: 67620 - DNA, 22 bp, Artificial Sequence
  chemically synthesized
cttcctccctttattgagaaaa

SEQ ID NO: 67621 - DNA, 22 bp, Artificial Sequence
  chemically synthesized
cctccctttattgagaaaaagc

SEQ ID NO: 67622 - DNA, 22 bp, Artificial Sequence
  chemically synthesized
ctccctttattgagaaaaagcc

SEQ ID NO: 67623 - DNA, 22 bp, Artificial Sequence
  chemically synthesized
cctttattgagaaaaagcctag

SEQ ID NO: 67624 - DNA, 22 bp, Artificial Sequence
  chemically synthesized
tattgagaaaaagcctaggagg

SEQ ID NO: 67625 - DNA, 22 bp, Artificial Sequence
  chemically synthesized
attgagaaaaagcctaggagga

SEQ ID NO: 67626 - DNA, 22 bp, Artificial Sequence
  chemically synthesized
ttgagaaaaagcctaggaggag

SEQ ID NO: 67627 - DNA, 22 bp, Artificial Sequence
  chemically synthesized
agaaaaagcctaggaggagaac

SEQ ID NO: 67628 - DNA, 22 bp, Artificial Sequence
  chemically synthesized
ggaggagaactcttaaaaggtg

SEQ ID NO: 67629 - DNA, 22 bp, Artificial Sequence
  chemically synthesized
ttaaaaggtgaagttagtaacc

SEQ ID NO: 67630 - DNA, 22 bp, Artificial Sequence
  chemically synthesized
aaaaggtgaagttagtaacctg

SEQ ID NO: 67631 - DNA, 22 bp, Artificial Sequence
  chemically synthesized
aaaggtgaagttagtaacctgt

SEQ ID NO: 67632 - DNA, 22 bp, Artificial Sequence
  chemically synthesized
gtaacctgttgtttgagtaatc

SEQ ID NO: 67633 - DNA, 22 bp, Artificial Sequence
  chemically synthesized
ttgtttgagtaatcaaggctct

SEQ ID NO: 67634 - DNA, 22 bp, Artificial Sequence
  chemically synthesized
tttgagtaatcaaggctctaag

SEQ ID NO: 67635 - DNA, 22 bp, Artificial Sequence
  chemically synthesized
gagtaatcaaggctctaagagg

SEQ ID NO: 67636 - DNA, 22 bp, Artificial Sequence
  chemically synthesized
agtaatcaaggctctaagagga

SEQ ID NO: 67637 - DNA, 22 bp, Artificial Sequence
  chemically synthesized
taagaggatagcattgatcaaa

SEQ ID NO: 67638 - DNA, 22 bp, Artificial Sequence
  chemically synthesized
agaggatagcattgatcaaaaa

SEQ ID NO: 67639 - DNA, 22 bp, Artificial Sequence
  chemically synthesized
atcaaaaaagagttttaaaatg

SEQ ID NO: 67640 - DNA, 22 bp, Artificial Sequence
  chemically synthesized
taaaatgagtgattgatgttat

SEQ ID NO: 67641 - DNA, 22 bp, Artificial Sequence
  chemically synthesized
aaaatgagtgattgatgttatt

SEQ ID NO: 67642 - DNA, 22 bp, Artificial Sequence
  chemically synthesized
aaatgagtgattgatgttatta

SEQ ID NO: 67643 - DNA, 22 bp, Artificial Sequence
  chemically synthesized
atgttattaaagtcactggtga

SEQ ID NO: 67644 - DNA, 22 bp, Artificial Sequence
  chemically synthesized
ttaaagtcactggtgaagtatc

SEQ ID NO: 67645 - DNA, 22 bp, Artificial Sequence
  chemically synthesized
aagtcactggtgaagtatcaag

SEQ ID NO: 67646 - DNA, 22 bp, Artificial Sequence
  chemically synthesized
gtgaagtatcaaggaatctaag

SEQ ID NO: 67647 - DNA, 22 bp, Artificial Sequence
  chemically synthesized
aggaccatgagagagtttcagg

SEQ ID NO: 67648 - DNA, 22 bp, Artificial Sequence
  chemically synthesized
cagggaagaaattctatattgt

SEQ ID NO: 67649 - DNA, 22 bp, Artificial Sequence
  chemically synthesized
agggaagaaattctatattgta

SEQ ID NO: 67650 - DNA, 22 bp, Artificial Sequence
  chemically synthesized
tatattgtagtgtctataatta

SEQ ID NO: 67651 - DNA, 22 bp, Artificial Sequence
  chemically synthesized
tattgtagtgtctataattatt

SEQ ID NO: 67652 - DNA, 22 bp, Artificial Sequence
  chemically synthesized
tagtgtctataattattgcttt

SEQ ID NO: 67653 - DNA, 22 bp, Artificial Sequence
  chemically synthesized
taattattgctttcttttgttt

SEQ ID NO: 67654 - DNA, 22 bp, Artificial Sequence
  chemically synthesized
ttgctttcttttgtttttgcag

SEQ ID NO: 67655 - DNA, 22 bp, Artificial Sequence
  chemically synthesized
ctttcttttgtttttgcagaat

SEQ ID NO: 67656 - DNA, 22 bp, Artificial Sequence
  chemically synthesized
tcttttgtttttgcagaataca

SEQ ID NO: 67657 - DNA, 22 bp, Artificial Sequence
  chemically synthesized
cttttgtttttgcagaatacac

SEQ ID NO: 67658 - DNA, 22 bp, Artificial Sequence
  chemically synthesized
ttttgtttttgcagaatacact

SEQ ID NO: 67659 - DNA, 22 bp, Artificial Sequence
  chemically synthesized
ttgtttttgcagaatacacttt

SEQ ID NO: 67660 - DNA, 22 bp, Artificial Sequence
  chemically synthesized
tgtttttgcagaatacactttt

SEQ ID NO: 67661 - DNA, 22 bp, Artificial Sequence
  chemically synthesized
gtttttgcagaatacacttttt

SEQ ID NO: 67662 - DNA, 22 bp, Artificial Sequence
  chemically synthesized
tttttgcagaatacacttttta

SEQ ID NO: 67663 - DNA, 22 bp, Artificial Sequence
  chemically synthesized
ttgcagaatacactttttaaag

SEQ ID NO: 67664 - DNA, 22 bp, Artificial Sequence
  chemically synthesized
tgcagaatacactttttaaaga

SEQ ID NO: 67665 - DNA, 22 bp, Artificial Sequence
  chemically synthesized
gcagaatacactttttaaagaa

SEQ ID NO: 67666 - DNA, 22 bp, Artificial Sequence
  chemically synthesized
cagaatacactttttaaagaac

SEQ ID NO: 67667 - DNA, 22 bp, Artificial Sequence
  chemically synthesized
tttaaagaacatcaggatttgg

SEQ ID NO: 67668 - DNA, 22 bp, Artificial Sequence
  chemically synthesized
ttaaagaacatcaggatttggt

SEQ ID NO: 67669 - DNA, 22 bp, Artificial Sequence
  chemically synthesized
taaagaacatcaggatttggta

SEQ ID NO: 67670 - DNA, 22 bp, Artificial Sequence
  chemically synthesized
aaagaacatcaggatttggtaa

SEQ ID NO: 67671 - DNA, 22 bp, Artificial Sequence
  chemically synthesized
aagaacatcaggatttggtaaa

SEQ ID NO: 67672 - DNA, 22 bp, Artificial Sequence
  chemically synthesized
ggtaaaacagccagtaaaaaag

SEQ ID NO: 67673 - DNA, 22 bp, Artificial Sequence
  chemically synthesized
gtaaaacagccagtaaaaaagc

SEQ ID NO: 67674 - DNA, 22 bp, Artificial Sequence
  chemically synthesized
atttctagaacaaaagagagtg

SEQ ID NO: 67675 - DNA, 22 bp, Artificial Sequence
  chemically synthesized
ctagaacaaaagagagtgcgat

SEQ ID NO: 67676 - DNA, 22 bp, Artificial Sequence
  chemically synthesized
tagaacaaaagagagtgcgatt

SEQ ID NO: 67677 - DNA, 22 bp, Artificial Sequence
  chemically synthesized
gaacaaaagagagtgcgatttt

SEQ ID NO: 67678 - DNA, 22 bp, Artificial Sequence
  chemically synthesized
tgacaatatcagaaggttaatt

SEQ ID NO: 67679 - DNA, 22 bp, Artificial Sequence
  chemically synthesized
gacaatatcagaaggttaatta

SEQ ID NO: 67680 - DNA, 22 bp, Artificial Sequence
  chemically synthesized
acaatatcagaaggttaattaa

SEQ ID NO: 67681 - DNA, 22 bp, Artificial Sequence
  chemically synthesized
attaagaagtctgtgagtgatg

SEQ ID NO: 67682 - DNA, 22 bp, Artificial Sequence
  chemically synthesized
agaagtctgtgagtgatgataa

SEQ ID NO: 67683 - DNA, 22 bp, Artificial Sequence
  chemically synthesized
tgagtgatgataaagctggcac

SEQ ID NO: 67684 - DNA, 22 bp, Artificial Sequence
  chemically synthesized
gcacattttcattacagattga

SEQ ID NO: 67685 - DNA, 22 bp, Artificial Sequence
  chemically synthesized
tcattacagattgacacaactc

SEQ ID NO: 67686 - DNA, 22 bp, Artificial Sequence
  chemically synthesized
cattacagattgacacaactca

SEQ ID NO: 67687 - DNA, 22 bp, Artificial Sequence
  chemically synthesized
attacagattgacacaactcaa

SEQ ID NO: 67688 - DNA, 22 bp, Artificial Sequence
  chemically synthesized
cagattgacacaactcaagtca

SEQ ID NO: 67689 - DNA, 22 bp, Artificial Sequence
  chemically synthesized
acacaactcaagtcacaggcat

SEQ ID NO: 67690 - DNA, 22 bp, Artificial Sequence
  chemically synthesized
aagtcacaggcatagctaatgt

SEQ ID NO: 67691 - DNA, 22 bp, Artificial Sequence
  chemically synthesized
atgtttgctctataatactctg

SEQ ID NO: 67692 - DNA, 22 bp, Artificial Sequence
  chemically synthesized
gctctataatactctgataagt

SEQ ID NO: 67693 - DNA, 22 bp, Artificial Sequence
  chemically synthesized
ctctataatactctgataagtc

SEQ ID NO: 67694 - DNA, 22 bp, Artificial Sequence
  chemically synthesized
tataatactctgataagtcaga

SEQ ID NO: 67695 - DNA, 22 bp, Artificial Sequence
  chemically synthesized
taatactctgataagtcagaga

SEQ ID NO: 67696 - DNA, 22 bp, Artificial Sequence
  chemically synthesized
tgataagtcagagaatctaagt

SEQ ID NO: 67697 - DNA, 22 bp, Artificial Sequence
  chemically synthesized
ataagtcagagaatctaagtga

SEQ ID NO: 67698 - DNA, 22 bp, Artificial Sequence
  chemically synthesized
agtgagaagaactggtatctat

SEQ ID NO: 67699 - DNA, 22 bp, Artificial Sequence
  chemically synthesized
gtatctatggtaaacatagggt

SEQ ID NO: 67700 - DNA, 22 bp, Artificial Sequence
  chemically synthesized
tggtaaacatagggtcaagagc

SEQ ID NO: 67701 - DNA, 22 bp, Artificial Sequence
  chemically synthesized
gatgcggctgaatagaaaggac

SEQ ID NO: 67702 - DNA, 22 bp, Artificial Sequence
  chemically synthesized
aatagaaaggacatttactttg

SEQ ID NO: 67703 - DNA, 22 bp, Artificial Sequence
  chemically synthesized
actttgcagttaggtaaagaag

SEQ ID NO: 67704 - DNA, 22 bp, Artificial Sequence
  chemically synthesized
ctttgcagttaggtaaagaagc

SEQ ID NO: 67705 - DNA, 22 bp, Artificial Sequence
  chemically synthesized
tgcagttaggtaaagaagcctc

SEQ ID NO: 67706 - DNA, 22 bp, Artificial Sequence
  chemically synthesized
gcagttaggtaaagaagcctct

SEQ ID NO: 67707 - DNA, 22 bp, Artificial Sequence
  chemically synthesized
cagttaggtaaagaagcctcta

SEQ ID NO: 67708 - DNA, 22 bp, Artificial Sequence
  chemically synthesized
ggtaaagaagcctctagctcag

SEQ ID NO: 67709 - DNA, 22 bp, Artificial Sequence
  chemically synthesized
tagctcagactagctgcactgt

SEQ ID NO: 67710 - DNA, 22 bp, Artificial Sequence
  chemically synthesized
gctcagactagctgcactgttg

SEQ ID NO: 67711 - DNA, 22 bp, Artificial Sequence
  chemically synthesized
agactagctgcactgttgttat

SEQ ID NO: 67712 - DNA, 22 bp, Artificial Sequence
  chemically synthesized
gctgcactgttgttatttgtgt

SEQ ID NO: 67713 - DNA, 22 bp, Artificial Sequence
  chemically synthesized
cactgttgttatttgtgtggct

SEQ ID NO: 67714 - DNA, 22 bp, Artificial Sequence
  chemically synthesized
ttgttatttgtgtggcttgaac

SEQ ID NO: 67715 - DNA, 22 bp, Artificial Sequence
  chemically synthesized
ttatttgtgtggcttgaaccta

SEQ ID NO: 67716 - DNA, 22 bp, Artificial Sequence
  chemically synthesized
tttgtgtggcttgaacctagta

SEQ ID NO: 67717 - DNA, 22 bp, Artificial Sequence
  chemically synthesized
gtgtggcttgaacctagtaatc

SEQ ID NO: 67718 - DNA, 22 bp, Artificial Sequence
  chemically synthesized
tgtggcttgaacctagtaatcg

SEQ ID NO: 67719 - DNA, 22 bp, Artificial Sequence
  chemically synthesized
gaacctagtaatcggattcaga

SEQ ID NO: 67720 - DNA, 22 bp, Artificial Sequence
  chemically synthesized
aacctagtaatcggattcagaa

SEQ ID NO: 67721 - DNA, 22 bp, Artificial Sequence
  chemically synthesized
gtaatcggattcagaactggaa

SEQ ID NO: 67722 - DNA, 22 bp, Artificial Sequence
  chemically synthesized
agaactggaatgggttccttca

SEQ ID NO: 67723 - DNA, 22 bp, Artificial Sequence
  chemically synthesized
gaatgggttccttcagggtact

SEQ ID NO: 67724 - DNA, 22 bp, Artificial Sequence
  chemically synthesized
cttcagggtactttacaaacgt

SEQ ID NO: 67725 - DNA, 22 bp, Artificial Sequence
  chemically synthesized
cagggtactttacaaacgttca

SEQ ID NO: 67726 - DNA, 22 bp, Artificial Sequence
  chemically synthesized
agggtactttacaaacgttcag

SEQ ID NO: 67727 - DNA, 22 bp, Artificial Sequence
  chemically synthesized
tacaaacgttcaggatgcattt

SEQ ID NO: 67728 - DNA, 22 bp, Artificial Sequence
  chemically synthesized
acaaacgttcaggatgcatttt

SEQ ID NO: 67729 - DNA, 22 bp, Artificial Sequence
  chemically synthesized
caaacgttcaggatgcatttta

SEQ ID NO: 67730 - DNA, 22 bp, Artificial Sequence
  chemically synthesized
aggatgcattttaagtgtagtc

SEQ ID NO: 67731 - DNA, 22 bp, Artificial Sequence
  chemically synthesized
taagtgtagtctagaaggtggt

SEQ ID NO: 67732 - DNA, 22 bp, Artificial Sequence
  chemically synthesized
aagtgtagtctagaaggtggta

SEQ ID NO: 67733 - DNA, 22 bp, Artificial Sequence
  chemically synthesized
agtgtagtctagaaggtggtac

SEQ ID NO: 67734 - DNA, 22 bp, Artificial Sequence
  chemically synthesized
gaaggtggtacatggaagagct

SEQ ID NO: 67735 - DNA, 22 bp, Artificial Sequence
  chemically synthesized
agggacttgaggattatggact

SEQ ID NO: 67736 - DNA, 22 bp, Artificial Sequence
  chemically synthesized
gaggattatggactgcgaaagg

SEQ ID NO: 67737 - DNA, 22 bp, Artificial Sequence
  chemically synthesized
aggattatggactgcgaaagga

SEQ ID NO: 67738 - DNA, 22 bp, Artificial Sequence
  chemically synthesized
tggactgcgaaaggactgtagg

SEQ ID NO: 67739 - DNA, 22 bp, Artificial Sequence
  chemically synthesized
cgaaaggactgtaggtagtcct

SEQ ID NO: 67740 - DNA, 22 bp, Artificial Sequence
  chemically synthesized
taggtagtcctgtattttggcc

SEQ ID NO: 67741 - DNA, 22 bp, Artificial Sequence
  chemically synthesized
tattttggcctgtcaccaatat

SEQ ID NO: 67742 - DNA, 22 bp, Artificial Sequence
  chemically synthesized
tggcctgtcaccaatatagaga

SEQ ID NO: 67743 - DNA, 22 bp, Artificial Sequence
  chemically synthesized
ggcctgtcaccaatatagagac

SEQ ID NO: 67744 - DNA, 22 bp, Artificial Sequence
  chemically synthesized
gcctgtcaccaatatagagacc

SEQ ID NO: 67745 - DNA, 22 bp, Artificial Sequence
  chemically synthesized
tcaccaatatagagacccctcc

SEQ ID NO: 67746 - DNA, 22 bp, Artificial Sequence
  chemically synthesized
ctcatcatagtgtcatccattc

SEQ ID NO: 67747 - DNA, 22 bp, Artificial Sequence
  chemically synthesized
atcatagtgtcatccattctct

SEQ ID NO: 67748 - DNA, 22 bp, Artificial Sequence
  chemically synthesized
tctttttgaagacccagggtga

SEQ ID NO: 67749 - DNA, 22 bp, Artificial Sequence
  chemically synthesized
tttttgaagacccagggtgaaa

SEQ ID NO: 67750 - DNA, 22 bp, Artificial Sequence
  chemically synthesized
tttgaagacccagggtgaaaga

SEQ ID NO: 67751 - DNA, 22 bp, Artificial Sequence
  chemically synthesized
ttgaagacccagggtgaaagaa

SEQ ID NO: 67752 - DNA, 22 bp, Artificial Sequence
  chemically synthesized
tgaagacccagggtgaaagaaa

SEQ ID NO: 67753 - DNA, 22 bp, Artificial Sequence
  chemically synthesized
gaagacccagggtgaaagaaag

SEQ ID NO: 67754 - DNA, 22 bp, Artificial Sequence
  chemically synthesized
aagacccagggtgaaagaaagg

SEQ ID NO: 67755 - DNA, 22 bp, Artificial Sequence
  chemically synthesized
cacgtgggacagctctactgct

SEQ ID NO: 67756 - DNA, 22 bp, Artificial Sequence
  chemically synthesized
tactgcttttgtgcctgtctca

SEQ ID NO: 67757 - DNA, 22 bp, Artificial Sequence
  chemically synthesized
ctgcttttgtgcctgtctcact

SEQ ID NO: 67758 - DNA, 22 bp, Artificial Sequence
  chemically synthesized
cttttgtgcctgtctcactgaa

SEQ ID NO: 67759 - DNA, 22 bp, Artificial Sequence
  chemically synthesized
ttgtgcctgtctcactgaaaaa

SEQ ID NO: 67760 - DNA, 22 bp, Artificial Sequence
  chemically synthesized
tgtgcctgtctcactgaaaaaa

SEQ ID NO: 67761 - DNA, 22 bp, Artificial Sequence
  chemically synthesized
gtgcctgtctcactgaaaaaaa

SEQ ID NO: 67762 - DNA, 22 bp, Artificial Sequence
  chemically synthesized
tgcctgtctcactgaaaaaaaa

SEQ ID NO: 67763 - DNA, 22 bp, Artificial Sequence
  chemically synthesized
tctcactgaaaaaaaaaaaaaa

SEQ ID NO: 67764 - DNA, 22 bp, Artificial Sequence
  chemically synthesized
actgaaaaaaaaaaaaaaacag

SEQ ID NO: 67765 - DNA, 22 bp, Artificial Sequence
  chemically synthesized
aaaaaaaaaaaaaaacagggaa

SEQ ID NO: 67766 - DNA, 22 bp, Artificial Sequence
  chemically synthesized
tctaaaaacatatgtttaggaa

SEQ ID NO: 67767 - DNA, 22 bp, Artificial Sequence
  chemically synthesized
aaaacatatgtttaggaaatat

SEQ ID NO: 67768 - DNA, 22 bp, Artificial Sequence
  chemically synthesized
aggaaatatacacacattcaca

SEQ ID NO: 67769 - DNA, 22 bp, Artificial Sequence
  chemically synthesized
ggaaatatacacacattcacac

SEQ ID NO: 67770 - DNA, 22 bp, Artificial Sequence
  chemically synthesized
acacacgtacacagacacatat

SEQ ID NO: 67771 - DNA, 22 bp, Artificial Sequence
  chemically synthesized
acatatacacacacatgaacac

SEQ ID NO: 67772 - DNA, 22 bp, Artificial Sequence
  chemically synthesized
acacacatgtgcatgcacatgc

SEQ ID NO: 67773 - DNA, 22 bp, Artificial Sequence
  chemically synthesized
acacatgcacaagcatacacac

SEQ ID NO: 67774 - DNA, 22 bp, Artificial Sequence
  chemically synthesized
acaaacacatatgcatgcacac

SEQ ID NO: 67775 - DNA, 22 bp, Artificial Sequence
  chemically synthesized
acacacatatgtacacataaat

SEQ ID NO: 67776 - DNA, 22 bp, Artificial Sequence
  chemically synthesized
gcaaacacacacacacgtacat

SEQ ID NO: 67777 - DNA, 22 bp, Artificial Sequence
  chemically synthesized
caaacacacacacacgtacatt

SEQ ID NO: 67778 - DNA, 22 bp, Artificial Sequence
  chemically synthesized
tagtgaatagcacacatctatg

SEQ ID NO: 67779 - DNA, 22 bp, Artificial Sequence
  chemically synthesized
agtgaatagcacacatctatgt

SEQ ID NO: 67780 - DNA, 22 bp, Artificial Sequence
  chemically synthesized
gtgaatagcacacatctatgta

SEQ ID NO: 67781 - DNA, 22 bp, Artificial Sequence
  chemically synthesized
tgtactcctgtggagagtcctg

SEQ ID NO: 67782 - DNA, 22 bp, Artificial Sequence
  chemically synthesized
ctgtggagagtcctgtggtttt

SEQ ID NO: 67783 - DNA, 22 bp, Artificial Sequence
  chemically synthesized
tggagagtcctgtggttttaat

SEQ ID NO: 67784 - DNA, 22 bp, Artificial Sequence
  chemically synthesized
tggttttaatacctgttaaagt

SEQ ID NO: 67785 - DNA, 22 bp, Artificial Sequence
  chemically synthesized
taatacctgttaaagttgggct

SEQ ID NO: 67786 - DNA, 22 bp, Artificial Sequence
  chemically synthesized
aatacctgttaaagttgggctc

SEQ ID NO: 67787 - DNA, 22 bp, Artificial Sequence
  chemically synthesized
atacctgttaaagttgggctcc

SEQ ID NO: 67788 - DNA, 22 bp, Artificial Sequence
  chemically synthesized
ttaaagttgggctcccaaagca

SEQ ID NO: 67789 - DNA, 22 bp, Artificial Sequence
  chemically synthesized
aagttgggctcccaaagcagtc

SEQ ID NO: 67790 - DNA, 22 bp, Artificial Sequence
  chemically synthesized
ggctcccaaagcagtcattaaa

SEQ ID NO: 67791 - DNA, 22 bp, Artificial Sequence
  chemically synthesized
ccaaagcagtcattaaacgtgt

SEQ ID NO: 67792 - DNA, 22 bp, Artificial Sequence
  chemically synthesized
aacgtgttggaatgatgctttt

SEQ ID NO: 67793 - DNA, 22 bp, Artificial Sequence
  chemically synthesized
gaatgatgctttttgcttagct

SEQ ID NO: 67794 - DNA, 22 bp, Artificial Sequence
  chemically synthesized
tttgcttagctgttttggcaca

SEQ ID NO: 67795 - DNA, 22 bp, Artificial Sequence
  chemically synthesized
ttgcttagctgttttggcacat

SEQ ID NO: 67796 - DNA, 22 bp, Artificial Sequence
  chemically synthesized
tgcttagctgttttggcacatt

SEQ ID NO: 67797 - DNA, 22 bp, Artificial Sequence
  chemically synthesized
gcttagctgttttggcacattt

SEQ ID NO: 67798 - DNA, 22 bp, Artificial Sequence
  chemically synthesized
cttagctgttttggcacatttg

SEQ ID NO: 67799 - DNA, 22 bp, Artificial Sequence
  chemically synthesized
agctgttttggcacatttggaa

SEQ ID NO: 67800 - DNA, 22 bp, Artificial Sequence
  chemically synthesized
gctgttttggcacatttggaaa

SEQ ID NO: 67801 - DNA, 22 bp, Artificial Sequence
  chemically synthesized
ttttggcacatttggaaatctg

SEQ ID NO: 67802 - DNA, 22 bp, Artificial Sequence
  chemically synthesized
tggcacatttggaaatctgcag

SEQ ID NO: 67803 - DNA, 22 bp, Artificial Sequence
  chemically synthesized
ggcacatttggaaatctgcagt

SEQ ID NO: 67804 - DNA, 22 bp, Artificial Sequence
  chemically synthesized
gcacatttggaaatctgcagta

SEQ ID NO: 67805 - DNA, 22 bp, Artificial Sequence
  chemically synthesized
ggaaatctgcagtattacctgt

SEQ ID NO: 67806 - DNA, 22 bp, Artificial Sequence
  chemically synthesized
gaaatctgcagtattacctgtt

SEQ ID NO: 67807 - DNA, 22 bp, Artificial Sequence
  chemically synthesized
cagtattacctgttgattagta

SEQ ID NO: 67808 - DNA, 22 bp, Artificial Sequence
  chemically synthesized
cctgttgattagtagacagtaa

SEQ ID NO: 67809 - DNA, 22 bp, Artificial Sequence
  chemically synthesized
ttgattagtagacagtaatgtg

SEQ ID NO: 67810 - DNA, 22 bp, Artificial Sequence
  chemically synthesized
attagtagacagtaatgtggct

SEQ ID NO: 67811 - DNA, 22 bp, Artificial Sequence
  chemically synthesized
gtagacagtaatgtggctgtat

SEQ ID NO: 67812 - DNA, 22 bp, Artificial Sequence
  chemically synthesized
tattacacacccagtgattagt

SEQ ID NO: 67813 - DNA, 22 bp, Artificial Sequence
  chemically synthesized
cacacccagtgattagtttcag

SEQ ID NO: 67814 - DNA, 22 bp, Artificial Sequence
  chemically synthesized
gtttcagaaacaaatagcatgt

SEQ ID NO: 67815 - DNA, 22 bp, Artificial Sequence
  chemically synthesized
cagaaacaaatagcatgttaat

SEQ ID NO: 67816 - DNA, 22 bp, Artificial Sequence
  chemically synthesized
agaaacaaatagcatgttaata

SEQ ID NO: 67817 - DNA, 22 bp, Artificial Sequence
  chemically synthesized
atagtcaaggaatctttgagat

SEQ ID NO: 67818 - DNA, 22 bp, Artificial Sequence
  chemically synthesized
tgagatgttcttgaggaaacca

SEQ ID NO: 67819 - DNA, 22 bp, Artificial Sequence
  chemically synthesized
gagatgttcttgaggaaaccaa

SEQ ID NO: 67820 - DNA, 22 bp, Artificial Sequence
  chemically synthesized
agatgttcttgaggaaaccaaa

SEQ ID NO: 67821 - DNA, 22 bp, Artificial Sequence
  chemically synthesized
ttgaggaaaccaaaaaacttga

SEQ ID NO: 67822 - DNA, 22 bp, Artificial Sequence
  chemically synthesized
gaggaaaccaaaaaacttgatt

SEQ ID NO: 67823 - DNA, 22 bp, Artificial Sequence
  chemically synthesized
aggaaaccaaaaaacttgattt

SEQ ID NO: 67824 - DNA, 22 bp, Artificial Sequence
  chemically synthesized
gatttaatgacttaaattccag

SEQ ID NO: 67825 - DNA, 22 bp, Artificial Sequence
  chemically synthesized
atttaatgacttaaattccagg

SEQ ID NO: 67826 - DNA, 22 bp, Artificial Sequence
  chemically synthesized
aatgacttaaattccaggaaca

SEQ ID NO: 67827 - DNA, 22 bp, Artificial Sequence
  chemically synthesized
atgacttaaattccaggaacat

SEQ ID NO: 67828 - DNA, 22 bp, Artificial Sequence
  chemically synthesized
aaattccaggaacatcccactg

SEQ ID NO: 67829 - DNA, 22 bp, Artificial Sequence
  chemically synthesized
aattccaggaacatcccactgg

SEQ ID NO: 67830 - DNA, 22 bp, Artificial Sequence
  chemically synthesized
caggaacatcccactgggctta

SEQ ID NO: 67831 - DNA, 22 bp, Artificial Sequence
  chemically synthesized
ggcttagagctctttgtcaaaa

SEQ ID NO: 67832 - DNA, 22 bp, Artificial Sequence
  chemically synthesized
agagctctttgtcaaaagttgg

SEQ ID NO: 67833 - DNA, 22 bp, Artificial Sequence
  chemically synthesized
gagctctttgtcaaaagttggt

SEQ ID NO: 67834 - DNA, 22 bp, Artificial Sequence
  chemically synthesized
tttgtcaaaagttggtacccaa

SEQ ID NO: 67835 - DNA, 22 bp, Artificial Sequence
  chemically synthesized
tgtcaaaagttggtacccaata

SEQ ID NO: 67836 - DNA, 22 bp, Artificial Sequence
  chemically synthesized
gtcaaaagttggtacccaatat

SEQ ID NO: 67837 - DNA, 22 bp, Artificial Sequence
  chemically synthesized
tcaaaagttggtacccaatata

SEQ ID NO: 67838 - DNA, 22 bp, Artificial Sequence
  chemically synthesized
gtacccaatatatgtagaaatg

SEQ ID NO: 67839 - DNA, 22 bp, Artificial Sequence
  chemically synthesized
aatcaaagccattcccagtttg

SEQ ID NO: 67840 - DNA, 22 bp, Artificial Sequence
  chemically synthesized
ccagtttgctgcatatttttta

SEQ ID NO: 67841 - DNA, 22 bp, Artificial Sequence
  chemically synthesized
gctgcatattttttaatgaaac

SEQ ID NO: 67842 - DNA, 22 bp, Artificial Sequence
  chemically synthesized
ctgcatattttttaatgaaacc

SEQ ID NO: 67843 - DNA, 22 bp, Artificial Sequence
  chemically synthesized
catattttttaatgaaacctga

SEQ ID NO: 67844 - DNA, 22 bp, Artificial Sequence
  chemically synthesized
tttaatgaaacctgaaaaataa

SEQ ID NO: 67845 - DNA, 22 bp, Artificial Sequence
  chemically synthesized
ttaatgaaacctgaaaaataag

SEQ ID NO: 67846 - DNA, 22 bp, Artificial Sequence
  chemically synthesized
taatgaaacctgaaaaataaga

SEQ ID NO: 67847 - DNA, 22 bp, Artificial Sequence
  chemically synthesized
aatgaaacctgaaaaataagag

SEQ ID NO: 67848 - DNA, 22 bp, Artificial Sequence
  chemically synthesized
atgaaacctgaaaaataagagt

SEQ ID NO: 67849 - DNA, 22 bp, Artificial Sequence
  chemically synthesized
aaaaataagagtcactattttt

SEQ ID NO: 67850 - DNA, 22 bp, Artificial Sequence
  chemically synthesized
tttttaaattcagccataagga

SEQ ID NO: 67851 - DNA, 22 bp, Artificial Sequence
  chemically synthesized
ttaaattcagccataaggaaac

SEQ ID NO: 67852 - DNA, 22 bp, Artificial Sequence
  chemically synthesized
taaattcagccataaggaaact

SEQ ID NO: 67853 - DNA, 22 bp, Artificial Sequence
  chemically synthesized
aaattcagccataaggaaactt

SEQ ID NO: 67854 - DNA, 22 bp, Artificial Sequence
  chemically synthesized
aattcagccataaggaaacttt

SEQ ID NO: 67855 - DNA, 22 bp, Artificial Sequence
  chemically synthesized
agccataaggaaactttgcaac

SEQ ID NO: 67856 - DNA, 22 bp, Artificial Sequence
  chemically synthesized
tgcaacctaataatgtgtaagg

SEQ ID NO: 67857 - DNA, 22 bp, Artificial Sequence
  chemically synthesized
gcaacctaataatgtgtaaggc

SEQ ID NO: 67858 - DNA, 22 bp, Artificial Sequence
  chemically synthesized
caacctaataatgtgtaaggca

SEQ ID NO: 67859 - DNA, 22 bp, Artificial Sequence
  chemically synthesized
ataatgtgtaaggcatttctga

SEQ ID NO: 67860 - DNA, 22 bp, Artificial Sequence
  chemically synthesized
ctgaggccccaagtggaaatac

SEQ ID NO: 67861 - DNA, 22 bp, Artificial Sequence
  chemically synthesized
tgaggccccaagtggaaatact

SEQ ID NO: 67862 - DNA, 22 bp, Artificial Sequence
  chemically synthesized
aggccccaagtggaaatactgg

SEQ ID NO: 67863 - DNA, 22 bp, Artificial Sequence
  chemically synthesized
ggtctagagagacctttatgaa

SEQ ID NO: 67864 - DNA, 22 bp, Artificial Sequence
  chemically synthesized
gagagacctttatgaaatagaa

SEQ ID NO: 67865 - DNA, 22 bp, Artificial Sequence
  chemically synthesized
tatgaaatagaacaggttgaaa

SEQ ID NO: 67866 - DNA, 22 bp, Artificial Sequence
  chemically synthesized
atgaaatagaacaggttgaaac

SEQ ID NO: 67867 - DNA, 22 bp, Artificial Sequence
  chemically synthesized
tgaaatagaacaggttgaaaca

SEQ ID NO: 67868 - DNA, 22 bp, Artificial Sequence
  chemically synthesized
aaacaccttccaccagaaaagt

SEQ ID NO: 67869 - DNA, 22 bp, Artificial Sequence
  chemically synthesized
ccaccagaaaagtgtaagacat

SEQ ID NO: 67870 - DNA, 22 bp, Artificial Sequence
  chemically synthesized
caccagaaaagtgtaagacatt

SEQ ID NO: 67871 - DNA, 22 bp, Artificial Sequence
  chemically synthesized
gaaaaaagattgagtcagaaaa

SEQ ID NO: 67872 - DNA, 22 bp, Artificial Sequence
  chemically synthesized
aaaaaagattgagtcagaaaag

SEQ ID NO: 67873 - DNA, 22 bp, Artificial Sequence
  chemically synthesized
agtcagaaaagggaaatgtgtc

SEQ ID NO: 67874 - DNA, 22 bp, Artificial Sequence
  chemically synthesized
gagagaccagaaagggaaacaa

SEQ ID NO: 67875 - DNA, 22 bp, Artificial Sequence
  chemically synthesized
agagaccagaaagggaaacaag

SEQ ID NO: 67876 - DNA, 22 bp, Artificial Sequence
  chemically synthesized
ctgctgtgtccgtgcagttgcc

SEQ ID NO: 67877 - DNA, 22 bp, Artificial Sequence
  chemically synthesized
ctgtgtccgtgcagttgccaca

SEQ ID NO: 67878 - DNA, 22 bp, Artificial Sequence
  chemically synthesized
tgtccgtgcagttgccacagct

SEQ ID NO: 67879 - DNA, 22 bp, Artificial Sequence
  chemically synthesized
ccacagctgcgttcgctgacat

SEQ ID NO: 67880 - DNA, 22 bp, Artificial Sequence
  chemically synthesized
cgttcgctgacatgtcggcttt

SEQ ID NO: 67881 - DNA, 22 bp, Artificial Sequence
  chemically synthesized
gctgacatgtcggctttaatgg

SEQ ID NO: 67882 - DNA, 22 bp, Artificial Sequence
  chemically synthesized
acatgtcggctttaatggaagc

SEQ ID NO: 67883 - DNA, 22 bp, Artificial Sequence
  chemically synthesized
taatggaagcagtgaggacaca

SEQ ID NO: 67884 - DNA, 22 bp, Artificial Sequence
  chemically synthesized
aatggaagcagtgaggacacaa

SEQ ID NO: 67885 - DNA, 22 bp, Artificial Sequence
  chemically synthesized
atggaagcagtgaggacacaat

SEQ ID NO: 67886 - DNA, 22 bp, Artificial Sequence
  chemically synthesized
tctggcacaagctggtttgggt

SEQ ID NO: 67887 - DNA, 22 bp, Artificial Sequence
  chemically synthesized
gcacaagctggtttgggtgttg

SEQ ID NO: 67888 - DNA, 22 bp, Artificial Sequence
  chemically synthesized
gtttgggtgttgtctcatgcta

SEQ ID NO: 67889 - DNA, 22 bp, Artificial Sequence
  chemically synthesized
gggtgttgtctcatgctaagaa

SEQ ID NO: 67890 - DNA, 22 bp, Artificial Sequence
  chemically synthesized
ggtgttgtctcatgctaagaag

SEQ ID NO: 67891 - DNA, 22 bp, Artificial Sequence
  chemically synthesized
tctcatgctaagaaggccctgg

SEQ ID NO: 67892 - DNA, 22 bp, Artificial Sequence
  chemically synthesized
atgctaagaaggccctggacct

SEQ ID NO: 67893 - DNA, 22 bp, Artificial Sequence
  chemically synthesized
agaaggccctggacctgatgga

SEQ ID NO: 67894 - DNA, 22 bp, Artificial Sequence
  chemically synthesized
gacctgatggagagcctggacc

SEQ ID NO: 67895 - DNA, 22 bp, Artificial Sequence
  chemically synthesized
atggagagcctggacctgttcc

SEQ ID NO: 67896 - DNA, 22 bp, Artificial Sequence
  chemically synthesized
gacctgttccctgtccttatca

SEQ ID NO: 67897 - DNA, 22 bp, Artificial Sequence
  chemically synthesized
ttccctgtccttatcaatgaca

SEQ ID NO: 67898 - DNA, 22 bp, Artificial Sequence
  chemically synthesized
cctgtccttatcaatgacagac

SEQ ID NO: 67899 - DNA, 22 bp, Artificial Sequence
  chemically synthesized
tccttatcaatgacagacggag

SEQ ID NO: 67900 - DNA, 22 bp, Artificial Sequence
  chemically synthesized
atcaatgacagacggagggtgg

SEQ ID NO: 67901 - DNA, 22 bp, Artificial Sequence
  chemically synthesized
tcaatgacagacggagggtgga

SEQ ID NO: 67902 - DNA, 22 bp, Artificial Sequence
  chemically synthesized
aatttcctaatggagggatcct

SEQ ID NO: 67903 - DNA, 22 bp, Artificial Sequence
  chemically synthesized
cctaatggagggatccttaggg

SEQ ID NO: 67904 - DNA, 22 bp, Artificial Sequence
  chemically synthesized
ctaatggagggatccttaggga

SEQ ID NO: 67905 - DNA, 22 bp, Artificial Sequence
  chemically synthesized
atggagggatccttagggattc

SEQ ID NO: 67906 - DNA, 22 bp, Artificial Sequence
  chemically synthesized
agggattccctaagcttaattt

SEQ ID NO: 67907 - DNA, 22 bp, Artificial Sequence
  chemically synthesized
gggattccctaagcttaatttg

SEQ ID NO: 67908 - DNA, 22 bp, Artificial Sequence
  chemically synthesized
cctaagcttaatttgtttttga

SEQ ID NO: 67909 - DNA, 22 bp, Artificial Sequence
  chemically synthesized
agcttaatttgtttttgactgt

SEQ ID NO: 67910 - DNA, 22 bp, Artificial Sequence
  chemically synthesized
aatttgtttttgactgttccag

SEQ ID NO: 67911 - DNA, 22 bp, Artificial Sequence
  chemically synthesized
atttgtttttgactgttccagt

SEQ ID NO: 67912 - DNA, 22 bp, Artificial Sequence
  chemically synthesized
gtttttgactgttccagtccta

SEQ ID NO: 67913 - DNA, 22 bp, Artificial Sequence
  chemically synthesized
tttttgactgttccagtcctaa

SEQ ID NO: 67914 - DNA, 22 bp, Artificial Sequence
  chemically synthesized
ttgactgttccagtcctaaagg

SEQ ID NO: 67915 - DNA, 22 bp, Artificial Sequence
  chemically synthesized
tgactgttccagtcctaaagga

SEQ ID NO: 67916 - DNA, 22 bp, Artificial Sequence
  chemically synthesized
gactgttccagtcctaaaggag

SEQ ID NO: 67917 - DNA, 22 bp, Artificial Sequence
  chemically synthesized
actgttccagtcctaaaggagg

SEQ ID NO: 67918 - DNA, 22 bp, Artificial Sequence
  chemically synthesized
ttccagtcctaaaggaggtggg

SEQ ID NO: 67919 - DNA, 22 bp, Artificial Sequence
  chemically synthesized
cagtcctaaaggaggtgggtcc

SEQ ID NO: 67920 - DNA, 22 bp, Artificial Sequence
  chemically synthesized
aaggaggtgggtcctggacagg

SEQ ID NO: 67921 - DNA, 22 bp, Artificial Sequence
  chemically synthesized
gacaggagggaaaacagcctca

SEQ ID NO: 67922 - DNA, 22 bp, Artificial Sequence
  chemically synthesized
atggcccatgggtctctgccca

SEQ ID NO: 67923 - DNA, 22 bp, Artificial Sequence
  chemically synthesized
tgcccagggaatttcaaagctt

SEQ ID NO: 67924 - DNA, 22 bp, Artificial Sequence
  chemically synthesized
cccagggaatttcaaagcttcc

SEQ ID NO: 67925 - DNA, 22 bp, Artificial Sequence
  chemically synthesized
caaagcttccagcgttcatact

SEQ ID NO: 67926 - DNA, 22 bp, Artificial Sequence
  chemically synthesized
aaagcttccagcgttcatactt

SEQ ID NO: 67927 - DNA, 22 bp, Artificial Sequence
  chemically synthesized
ccagcgttcatacttcccttac

SEQ ID NO: 67928 - DNA, 22 bp, Artificial Sequence
  chemically synthesized
cagcgttcatacttcccttacc

SEQ ID NO: 67929 - DNA, 22 bp, Artificial Sequence
  chemically synthesized
atacttcccttaccctaagaca

SEQ ID NO: 67930 - DNA, 22 bp, Artificial Sequence
  chemically synthesized
cccttaccctaagacagcagtg

SEQ ID NO: 67931 - DNA, 22 bp, Artificial Sequence
  chemically synthesized
ccttaccctaagacagcagtgc

SEQ ID NO: 67932 - DNA, 22 bp, Artificial Sequence
  chemically synthesized
accctaagacagcagtgctgat

SEQ ID NO: 67933 - DNA, 22 bp, Artificial Sequence
  chemically synthesized
ccctaagacagcagtgctgatt

SEQ ID NO: 67934 - DNA, 22 bp, Artificial Sequence
  chemically synthesized
agacagcagtgctgattcagct

SEQ ID NO: 67935 - DNA, 22 bp, Artificial Sequence
  chemically synthesized
attcagcttgagtgtgcatgag

SEQ ID NO: 67936 - DNA, 22 bp, Artificial Sequence
  chemically synthesized
agcttgagtgtgcatgagaatc

SEQ ID NO: 67937 - DNA, 22 bp, Artificial Sequence
  chemically synthesized
gagtgtgcatgagaatcacctg

SEQ ID NO: 67938 - DNA, 22 bp, Artificial Sequence
  chemically synthesized
agtgtgcatgagaatcacctgg

SEQ ID NO: 67939 - DNA, 22 bp, Artificial Sequence
  chemically synthesized
gagaatttattcaacatagaag

SEQ ID NO: 67940 - DNA, 22 bp, Artificial Sequence
  chemically synthesized
attcaacatagaaggctgcttc

SEQ ID NO: 67941 - DNA, 22 bp, Artificial Sequence
  chemically synthesized
ttcaacatagaaggctgcttcc

SEQ ID NO: 67942 - DNA, 22 bp, Artificial Sequence
  chemically synthesized
aacatagaaggctgcttcccca

SEQ ID NO: 67943 - DNA, 22 bp, Artificial Sequence
  chemically synthesized
cttccccaccctcaatttctga

SEQ ID NO: 67944 - DNA, 22 bp, Artificial Sequence
  chemically synthesized
ccccaccctcaatttctgattc

SEQ ID NO: 67945 - DNA, 22 bp, Artificial Sequence
  chemically synthesized
cccaccctcaatttctgattca

SEQ ID NO: 67946 - DNA, 22 bp, Artificial Sequence
  chemically synthesized
aatttctgattcagtaagtctg

SEQ ID NO: 67947 - DNA, 22 bp, Artificial Sequence
  chemically synthesized
ctgattcagtaagtctgaggtg

SEQ ID NO: 67948 - DNA, 22 bp, Artificial Sequence
  chemically synthesized
tgattcagtaagtctgaggtgg

SEQ ID NO: 67949 - DNA, 22 bp, Artificial Sequence
  chemically synthesized
attcagtaagtctgaggtggtg

SEQ ID NO: 67950 - DNA, 22 bp, Artificial Sequence
  chemically synthesized
agtaagtctgaggtggtgccca

SEQ ID NO: 67951 - DNA, 22 bp, Artificial Sequence
  chemically synthesized
aggtggtgcccaagaatttgca

SEQ ID NO: 67952 - DNA, 22 bp, Artificial Sequence
  chemically synthesized
gcattttgaacaaactcccagg

SEQ ID NO: 67953 - DNA, 22 bp, Artificial Sequence
  chemically synthesized
cattttgaacaaactcccaggt

SEQ ID NO: 67954 - DNA, 22 bp, Artificial Sequence
  chemically synthesized
tgaacaaactcccaggtgatgc

SEQ ID NO: 67955 - DNA, 22 bp, Artificial Sequence
  chemically synthesized
gaacaaactcccaggtgatgct

SEQ ID NO: 67956 - DNA, 22 bp, Artificial Sequence
  chemically synthesized
aacaaactcccaggtgatgctg

SEQ ID NO: 67957 - DNA, 22 bp, Artificial Sequence
  chemically synthesized
ccaggtgatgctgatcgggggt

SEQ ID NO: 67958 - DNA, 22 bp, Artificial Sequence
  chemically synthesized
atcgggggtgggcctgggtctg

SEQ ID NO: 67959 - DNA, 22 bp, Artificial Sequence
  chemically synthesized
ggtctgcgctgtgagaatcact

SEQ ID NO: 67960 - DNA, 22 bp, Artificial Sequence
  chemically synthesized
cgctgtgagaatcacttgccta

SEQ ID NO: 67961 - DNA, 22 bp, Artificial Sequence
  chemically synthesized
tgagaatcacttgcctaagagc

SEQ ID NO: 67962 - DNA, 22 bp, Artificial Sequence
  chemically synthesized
gcctaagagcactaacaaagaa

SEQ ID NO: 67963 - DNA, 22 bp, Artificial Sequence
  chemically synthesized
cctaagagcactaacaaagaaa

SEQ ID NO: 67964 - DNA, 22 bp, Artificial Sequence
  chemically synthesized
agagcactaacaaagaaaaaaa

SEQ ID NO: 67965 - DNA, 22 bp, Artificial Sequence
  chemically synthesized
acaaagaaaaaaagaggacata

SEQ ID NO: 67966 - DNA, 22 bp, Artificial Sequence
  chemically synthesized
gatcacccacttcctagccagc

SEQ ID NO: 67967 - DNA, 22 bp, Artificial Sequence
  chemically synthesized
cctagccagcaaccagagccca

SEQ ID NO: 67968 - DNA, 22 bp, Artificial Sequence
  chemically synthesized
ctagccagcaaccagagcccat

SEQ ID NO: 67969 - DNA, 22 bp, Artificial Sequence
  chemically synthesized
gccagcaaccagagcccatctc

SEQ ID NO: 67970 - DNA, 22 bp, Artificial Sequence
  chemically synthesized
tggctggggagaatgaaagcga

SEQ ID NO: 67971 - DNA, 22 bp, Artificial Sequence
  chemically synthesized
gctggggagaatgaaagcgaag

SEQ ID NO: 67972 - DNA, 22 bp, Artificial Sequence
  chemically synthesized
gggagaatgaaagcgaaggtgg

SEQ ID NO: 67973 - DNA, 22 bp, Artificial Sequence
  chemically synthesized
aaccaggggcagctccttttcc

SEQ ID NO: 67974 - DNA, 22 bp, Artificial Sequence
  chemically synthesized
cttttccccaccttggcctggg

SEQ ID NO: 67975 - DNA, 22 bp, Artificial Sequence
  chemically synthesized
ttccccaccttggcctgggaag

SEQ ID NO: 67976 - DNA, 22 bp, Artificial Sequence
  chemically synthesized
tccccaccttggcctgggaagg

SEQ ID NO: 67977 - DNA, 22 bp, Artificial Sequence
  chemically synthesized
ccccaccttggcctgggaaggc

SEQ ID NO: 67978 - DNA, 22 bp, Artificial Sequence
  chemically synthesized
cccaccttggcctgggaaggca

SEQ ID NO: 67979 - DNA, 22 bp, Artificial Sequence
  chemically synthesized
ggcctgggaaggcagagctgct

SEQ ID NO: 67980 - DNA, 22 bp, Artificial Sequence
  chemically synthesized
gcctgggaaggcagagctgctc

SEQ ID NO: 67981 - DNA, 22 bp, Artificial Sequence
  chemically synthesized
ggaaggcagagctgctcctcga

SEQ ID NO: 67982 - DNA, 22 bp, Artificial Sequence
  chemically synthesized
ctcctcgagtttgacgctcaga

SEQ ID NO: 67983 - DNA, 22 bp, Artificial Sequence
  chemically synthesized
ctcgagtttgacgctcagaagc

SEQ ID NO: 67984 - DNA, 22 bp, Artificial Sequence
  chemically synthesized
gagtttgacgctcagaagcatt

SEQ ID NO: 67985 - DNA, 22 bp, Artificial Sequence
  chemically synthesized
gacgctcagaagcattaattgt

SEQ ID NO: 67986 - DNA, 22 bp, Artificial Sequence
  chemically synthesized
acgctcagaagcattaattgtg

SEQ ID NO: 67987 - DNA, 22 bp, Artificial Sequence
  chemically synthesized
agaagcattaattgtgatactt

SEQ ID NO: 67988 - DNA, 22 bp, Artificial Sequence
  chemically synthesized
attgtgatactttactttgcct

SEQ ID NO: 67989 - DNA, 22 bp, Artificial Sequence
  chemically synthesized
tgatactttactttgcctaagc

SEQ ID NO: 67990 - DNA, 22 bp, Artificial Sequence
  chemically synthesized
tactttgcctaagccgtgatga

SEQ ID NO: 67991 - DNA, 22 bp, Artificial Sequence
  chemically synthesized
actttgcctaagccgtgatgaa

SEQ ID NO: 67992 - DNA, 22 bp, Artificial Sequence
  chemically synthesized
ctttgcctaagccgtgatgaaa

SEQ ID NO: 67993 - DNA, 22 bp, Artificial Sequence
  chemically synthesized
tgcctaagccgtgatgaaataa

SEQ ID NO: 67994 - DNA, 22 bp, Artificial Sequence
  chemically synthesized
gcctaagccgtgatgaaataat

SEQ ID NO: 67995 - DNA, 22 bp, Artificial Sequence
  chemically synthesized
cctaagccgtgatgaaataatt

SEQ ID NO: 67996 - DNA, 22 bp, Artificial Sequence
  chemically synthesized
agccgtgatgaaataattgaag

SEQ ID NO: 67997 - DNA, 22 bp, Artificial Sequence
  chemically synthesized
aaggcatcatagcaagaagtta

SEQ ID NO: 67998 - DNA, 22 bp, Artificial Sequence
  chemically synthesized
agccctagggaggctattaaca

SEQ ID NO: 67999 - DNA, 22 bp, Artificial Sequence
  chemically synthesized
gggaggctattaacaatttagc

SEQ ID NO: 68000 - DNA, 22 bp, Artificial Sequence
  chemically synthesized
ttaacaatttagcatttccagt

SEQ ID NO: 68001 - DNA, 22 bp, Artificial Sequence
  chemically synthesized
acaatttagcatttccagttca

SEQ ID NO: 68002 - DNA, 22 bp, Artificial Sequence
  chemically synthesized
agcatttccagttcatgtggga

SEQ ID NO: 68003 - DNA, 22 bp, Artificial Sequence
  chemically synthesized
gcatttccagttcatgtgggaa

SEQ ID NO: 68004 - DNA, 22 bp, Artificial Sequence
  chemically synthesized
ccagttcatgtgggaatgtcga

SEQ ID NO: 68005 - DNA, 22 bp, Artificial Sequence
  chemically synthesized
cagttcatgtgggaatgtcgat

SEQ ID NO: 68006 - DNA, 22 bp, Artificial Sequence
  chemically synthesized
atgtgggaatgtcgattttact

SEQ ID NO: 68007 - DNA, 22 bp, Artificial Sequence
  chemically synthesized
tacttaccaaagagaatattat

SEQ ID NO: 68008 - DNA, 22 bp, Artificial Sequence
  chemically synthesized
acttaccaaagagaatattatg

SEQ ID NO: 68009 - DNA, 22 bp, Artificial Sequence
  chemically synthesized
cttaccaaagagaatattatgg

SEQ ID NO: 68010 - DNA, 22 bp, Artificial Sequence
  chemically synthesized
accaaagagaatattatggatg

SEQ ID NO: 68011 - DNA, 22 bp, Artificial Sequence
  chemically synthesized
ccaaagagaatattatggatgt

SEQ ID NO: 68012 - DNA, 22 bp, Artificial Sequence
  chemically synthesized
tggatgtgtttagtggaagaag

SEQ ID NO: 68013 - DNA, 22 bp, Artificial Sequence
  chemically synthesized
agtggaagaagcagcagaatca

SEQ ID NO: 68014 - DNA, 22 bp, Artificial Sequence
  chemically synthesized
gtggaagaagcagcagaatcag

SEQ ID NO: 68015 - DNA, 22 bp, Artificial Sequence
  chemically synthesized
gggtccccagttggctttgctt

SEQ ID NO: 68016 - DNA, 22 bp, Artificial Sequence
  chemically synthesized
gctttgctttgaccctcttcct

SEQ ID NO: 68017 - DNA, 22 bp, Artificial Sequence
  chemically synthesized
tgctttgaccctcttcctgaag

SEQ ID NO: 68018 - DNA, 22 bp, Artificial Sequence
  chemically synthesized
gctttgaccctcttcctgaagg

SEQ ID NO: 68019 - DNA, 22 bp, Artificial Sequence
  chemically synthesized
ctttgaccctcttcctgaagga

SEQ ID NO: 68020 - DNA, 22 bp, Artificial Sequence
  chemically synthesized
tgaccctcttcctgaaggaaga

SEQ ID NO: 68021 - DNA, 22 bp, Artificial Sequence
  chemically synthesized
gaccctcttcctgaaggaagat

SEQ ID NO: 68022 - DNA, 22 bp, Artificial Sequence
  chemically synthesized
accctcttcctgaaggaagata

SEQ ID NO: 68023 - DNA, 22 bp, Artificial Sequence
  chemically synthesized
ttcctgaaggaagataaatgca

SEQ ID NO: 68024 - DNA, 22 bp, Artificial Sequence
  chemically synthesized
cctgaaggaagataaatgcaag

SEQ ID NO: 68025 - DNA, 22 bp, Artificial Sequence
  chemically synthesized
ctgaaggaagataaatgcaagg

SEQ ID NO: 68026 - DNA, 22 bp, Artificial Sequence
  chemically synthesized
aaggaagataaatgcaagggtg

SEQ ID NO: 68027 - DNA, 22 bp, Artificial Sequence
  chemically synthesized
acaaagacagtgtgcttttttt

SEQ ID NO: 68028 - DNA, 22 bp, Artificial Sequence
  chemically synthesized
tttttctaaagtaaatagcttc

SEQ ID NO: 68029 - DNA, 22 bp, Artificial Sequence
  chemically synthesized
ttttctaaagtaaatagcttct

SEQ ID NO: 68030 - DNA, 22 bp, Artificial Sequence
  chemically synthesized
tttctaaagtaaatagcttctt

SEQ ID NO: 68031 - DNA, 22 bp, Artificial Sequence
  chemically synthesized
ttctaaagtaaatagcttctta

SEQ ID NO: 68032 - DNA, 22 bp, Artificial Sequence
  chemically synthesized
tctaaagtaaatagcttcttag

SEQ ID NO: 68033 - DNA, 22 bp, Artificial Sequence
  chemically synthesized
ctaaagtaaatagcttcttagg

SEQ ID NO: 68034 - DNA, 22 bp, Artificial Sequence
  chemically synthesized
taaagtaaatagcttcttaggc

SEQ ID NO: 68035 - DNA, 22 bp, Artificial Sequence
  chemically synthesized
aagtaaatagcttcttaggctg

SEQ ID NO: 68036 - DNA, 22 bp, Artificial Sequence
  chemically synthesized
cttaggctgatagaaatgtttt

SEQ ID NO: 68037 - DNA, 22 bp, Artificial Sequence
  chemically synthesized
ttaggctgatagaaatgttttt

SEQ ID NO: 68038 - DNA, 22 bp, Artificial Sequence
  chemically synthesized
aggctgatagaaatgtttttag

SEQ ID NO: 68039 - DNA, 22 bp, Artificial Sequence
  chemically synthesized
ggctgatagaaatgtttttagc

SEQ ID NO: 68040 - DNA, 22 bp, Artificial Sequence
  chemically synthesized
atagaaatgtttttagctgtct

SEQ ID NO: 68041 - DNA, 22 bp, Artificial Sequence
  chemically synthesized
ttagctgtctaattctgcaggg

SEQ ID NO: 68042 - DNA, 22 bp, Artificial Sequence
  chemically synthesized
tagctgtctaattctgcagggg

SEQ ID NO: 68043 - DNA, 22 bp, Artificial Sequence
  chemically synthesized
agctgtctaattctgcagggga

SEQ ID NO: 68044 - DNA, 22 bp, Artificial Sequence
  chemically synthesized
gctgtctaattctgcaggggaa

SEQ ID NO: 68045 - DNA, 22 bp, Artificial Sequence
  chemically synthesized
tctaattctgcaggggaagcag

SEQ ID NO: 68046 - DNA, 22 bp, Artificial Sequence
  chemically synthesized
attctgcaggggaagcagaggt

SEQ ID NO: 68047 - DNA, 22 bp, Artificial Sequence
  chemically synthesized
tgcaggggaagcagaggtagag

SEQ ID NO: 68048 - DNA, 22 bp, Artificial Sequence
  chemically synthesized
caggggaagcagaggtagaggg

SEQ ID NO: 68049 - DNA, 22 bp, Artificial Sequence
  chemically synthesized
gttttccaattgtgagaccaag

SEQ ID NO: 68050 - DNA, 22 bp, Artificial Sequence
  chemically synthesized
ttttccaattgtgagaccaagt

SEQ ID NO: 68051 - DNA, 22 bp, Artificial Sequence
  chemically synthesized
tccaattgtgagaccaagtcag

SEQ ID NO: 68052 - DNA, 22 bp, Artificial Sequence
  chemically synthesized
ccaattgtgagaccaagtcagt

SEQ ID NO: 68053 - DNA, 22 bp, Artificial Sequence
  chemically synthesized
caattgtgagaccaagtcagtt

SEQ ID NO: 68054 - DNA, 22 bp, Artificial Sequence
  chemically synthesized
tgagaccaagtcagttcattgg

SEQ ID NO: 68055 - DNA, 22 bp, Artificial Sequence
  chemically synthesized
attggcacctttcgaaagcccc

SEQ ID NO: 68056 - DNA, 22 bp, Artificial Sequence
  chemically synthesized
gcacctttcgaaagccccatgt

SEQ ID NO: 68057 - DNA, 22 bp, Artificial Sequence
  chemically synthesized
tcgaaagccccatgtagcgctg

SEQ ID NO: 68058 - DNA, 22 bp, Artificial Sequence
  chemically synthesized
cgaaagccccatgtagcgctgc

SEQ ID NO: 68059 - DNA, 22 bp, Artificial Sequence
  chemically synthesized
gaaagccccatgtagcgctgct

SEQ ID NO: 68060 - DNA, 22 bp, Artificial Sequence
  chemically synthesized
ctgggctggaccctcccccaag

SEQ ID NO: 68061 - DNA, 22 bp, Artificial Sequence
  chemically synthesized
ggctggaccctcccccaagacg

SEQ ID NO: 68062 - DNA, 22 bp, Artificial Sequence
  chemically synthesized
gaccctcccccaagacggttaa

SEQ ID NO: 68063 - DNA, 22 bp, Artificial Sequence
  chemically synthesized
ccccaagacggttaagtactgc

SEQ ID NO: 68064 - DNA, 22 bp, Artificial Sequence
  chemically synthesized
agtactgcttaatggatcagta

SEQ ID NO: 68065 - DNA, 22 bp, Artificial Sequence
  chemically synthesized
cttaatggatcagtagaaacag

SEQ ID NO: 68066 - DNA, 22 bp, Artificial Sequence
  chemically synthesized
aatggatcagtagaaacaggac

SEQ ID NO: 68067 - DNA, 22 bp, Artificial Sequence
  chemically synthesized
atggatcagtagaaacaggacc

SEQ ID NO: 68068 - DNA, 22 bp, Artificial Sequence
  chemically synthesized
cttgttgggcagtgaagaccac

SEQ ID NO: 68069 - DNA, 22 bp, Artificial Sequence
  chemically synthesized
ttgttgggcagtgaagaccacg

SEQ ID NO: 68070 - DNA, 22 bp, Artificial Sequence
  chemically synthesized
gttgggcagtgaagaccacggc

SEQ ID NO: 68071 - DNA, 22 bp, Artificial Sequence
  chemically synthesized
ttgggcagtgaagaccacggca

SEQ ID NO: 68072 - DNA, 22 bp, Artificial Sequence
  chemically synthesized
ggcagtgaagaccacggcagga

SEQ ID NO: 68073 - DNA, 22 bp, Artificial Sequence
  chemically synthesized
ccaggaaagaccactggatcag

SEQ ID NO: 68074 - DNA, 22 bp, Artificial Sequence
  chemically synthesized
gatcaggagtcaggagattaat

SEQ ID NO: 68075 - DNA, 22 bp, Artificial Sequence
  chemically synthesized
attctaatcttcacattgtggt

SEQ ID NO: 68076 - DNA, 22 bp, Artificial Sequence
  chemically synthesized
taatcttcacattgtggttaat

SEQ ID NO: 68077 - DNA, 22 bp, Artificial Sequence
  chemically synthesized
atcttcacattgtggttaatca

SEQ ID NO: 68078 - DNA, 22 bp, Artificial Sequence
  chemically synthesized
cacattgtggttaatcatcagt

SEQ ID NO: 68079 - DNA, 22 bp, Artificial Sequence
  chemically synthesized
acattgtggttaatcatcagtg

SEQ ID NO: 68080 - DNA, 22 bp, Artificial Sequence
  chemically synthesized
tggttaatcatcagtgtagcca

SEQ ID NO: 68081 - DNA, 22 bp, Artificial Sequence
  chemically synthesized
atcatcagtgtagccatgggca

SEQ ID NO: 68082 - DNA, 22 bp, Artificial Sequence
  chemically synthesized
aatttctcatggcctcagtttc

SEQ ID NO: 68083 - DNA, 22 bp, Artificial Sequence
  chemically synthesized
atttctcatggcctcagtttcc

SEQ ID NO: 68084 - DNA, 22 bp, Artificial Sequence
  chemically synthesized
ctcatggcctcagtttccccat

SEQ ID NO: 68085 - DNA, 22 bp, Artificial Sequence
  chemically synthesized
tcatggcctcagtttccccatc

SEQ ID NO: 68086 - DNA, 22 bp, Artificial Sequence
  chemically synthesized
atggcctcagtttccccatctg

SEQ ID NO: 68087 - DNA, 22 bp, Artificial Sequence
  chemically synthesized
agtttccccatctgtaaaatga

SEQ ID NO: 68088 - DNA, 22 bp, Artificial Sequence
  chemically synthesized
ccccatctgtaaaatgaaggga

SEQ ID NO: 68089 - DNA, 22 bp, Artificial Sequence
  chemically synthesized
cccatctgtaaaatgaagggac

SEQ ID NO: 68090 - DNA, 22 bp, Artificial Sequence
  chemically synthesized
taaaatgaagggacagacttga

SEQ ID NO: 68091 - DNA, 22 bp, Artificial Sequence
  chemically synthesized
gatgatagctagggttttttac

SEQ ID NO: 68092 - DNA, 22 bp, Artificial Sequence
  chemically synthesized
atgatagctagggttttttaca

SEQ ID NO: 68093 - DNA, 22 bp, Artificial Sequence
  chemically synthesized
gggttttttacaacttagaaaa

SEQ ID NO: 68094 - DNA, 22 bp, Artificial Sequence
  chemically synthesized
tttacaacttagaaaacaaaaa

SEQ ID NO: 68095 - DNA, 22 bp, Artificial Sequence
  chemically synthesized
ttacaacttagaaaacaaaaac

SEQ ID NO: 68096 - DNA, 22 bp, Artificial Sequence
  chemically synthesized
tacaacttagaaaacaaaaaca

SEQ ID NO: 68097 - DNA, 22 bp, Artificial Sequence
  chemically synthesized
acaacttagaaaacaaaaacaa

SEQ ID NO: 68098 - DNA, 22 bp, Artificial Sequence
  chemically synthesized
caacttagaaaacaaaaacaaa

SEQ ID NO: 68099 - DNA, 22 bp, Artificial Sequence
  chemically synthesized
agaaaacaaaaacaaaaacaaa

SEQ ID NO: 68100 - DNA, 22 bp, Artificial Sequence
  chemically synthesized
gaaaacaaaaacaaaaacaaaa

SEQ ID NO: 68101 - DNA, 22 bp, Artificial Sequence
  chemically synthesized
tgctgccagatagtcagatgag

SEQ ID NO: 68102 - DNA, 22 bp, Artificial Sequence
  chemically synthesized
ccagatagtcagatgagacctc

SEQ ID NO: 68103 - DNA, 22 bp, Artificial Sequence
  chemically synthesized
actttgccacacggccagacac

SEQ ID NO: 68104 - DNA, 22 bp, Artificial Sequence
  chemically synthesized
tgccacacggccagacactgta

SEQ ID NO: 68105 - DNA, 22 bp, Artificial Sequence
  chemically synthesized
gccacacggccagacactgtag

SEQ ID NO: 68106 - DNA, 22 bp, Artificial Sequence
  chemically synthesized
ccacacggccagacactgtaga

SEQ ID NO: 68107 - DNA, 22 bp, Artificial Sequence
  chemically synthesized
tagagatctggtcctgccgtca

SEQ ID NO: 68108 - DNA, 22 bp, Artificial Sequence
  chemically synthesized
gtcctgccgtcagcttgtttag

SEQ ID NO: 68109 - DNA, 22 bp, Artificial Sequence
  chemically synthesized
ccgtcagcttgtttagggctaa

SEQ ID NO: 68110 - DNA, 22 bp, Artificial Sequence
  chemically synthesized
gtttagggctaatgggtttgta

SEQ ID NO: 68111 - DNA, 22 bp, Artificial Sequence
  chemically synthesized
tttagggctaatgggtttgtag

SEQ ID NO: 68112 - DNA, 22 bp, Artificial Sequence
  chemically synthesized
agggctaatgggtttgtagaca

SEQ ID NO: 68113 - DNA, 22 bp, Artificial Sequence
  chemically synthesized
gggctaatgggtttgtagacaa

SEQ ID NO: 68114 - DNA, 22 bp, Artificial Sequence
  chemically synthesized
atgggtttgtagacaagtttgc

SEQ ID NO: 68115 - DNA, 22 bp, Artificial Sequence
  chemically synthesized
gtagacaagtttgccaacaaga

SEQ ID NO: 68116 - DNA, 22 bp, Artificial Sequence
  chemically synthesized
tagacaagtttgccaacaagag

SEQ ID NO: 68117 - DNA, 22 bp, Artificial Sequence
  chemically synthesized
gccaacaagagattcatgcgag

SEQ ID NO: 68118 - DNA, 22 bp, Artificial Sequence
  chemically synthesized
ccaacaagagattcatgcgagg

SEQ ID NO: 68119 - DNA, 22 bp, Artificial Sequence
  chemically synthesized
atgcgaggggctaggcatggat

SEQ ID NO: 68120 - DNA, 22 bp, Artificial Sequence
  chemically synthesized
ggcatggattaggttagcagtt

SEQ ID NO: 68121 - DNA, 22 bp, Artificial Sequence
  chemically synthesized
ggttagcagttctcccatttct

SEQ ID NO: 68122 - DNA, 22 bp, Artificial Sequence
  chemically synthesized
gcagttctcccatttcttgctg

SEQ ID NO: 68123 - DNA, 22 bp, Artificial Sequence
  chemically synthesized
tcccatttcttgctggaggcct

SEQ ID NO: 68124 - DNA, 22 bp, Artificial Sequence
  chemically synthesized
ccatttcttgctggaggcctgc

SEQ ID NO: 68125 - DNA, 22 bp, Artificial Sequence
  chemically synthesized
cttgctggaggcctgctgaagc

SEQ ID NO: 68126 - DNA, 22 bp, Artificial Sequence
  chemically synthesized
ttgctggaggcctgctgaagca

SEQ ID NO: 68127 - DNA, 22 bp, Artificial Sequence
  chemically synthesized
gctggaggcctgctgaagcact

SEQ ID NO: 68128 - DNA, 22 bp, Artificial Sequence
  chemically synthesized
ctggaggcctgctgaagcactt

SEQ ID NO: 68129 - DNA, 22 bp, Artificial Sequence
  chemically synthesized
gaggcctgctgaagcacttcag

SEQ ID NO: 68130 - DNA, 22 bp, Artificial Sequence
  chemically synthesized
ctgaagcacttcagggtctctt

SEQ ID NO: 68131 - DNA, 22 bp, Artificial Sequence
  chemically synthesized
aagcacttcagggtctcttccc

SEQ ID NO: 68132 - DNA, 22 bp, Artificial Sequence
  chemically synthesized
cagggtctcttcccagagtaag

SEQ ID NO: 68133 - DNA, 22 bp, Artificial Sequence
  chemically synthesized
agggtctcttcccagagtaagt

SEQ ID NO: 68134 - DNA, 22 bp, Artificial Sequence
  chemically synthesized
ttcccagagtaagtggcagaga

SEQ ID NO: 68135 - DNA, 22 bp, Artificial Sequence
  chemically synthesized
cccagagtaagtggcagagaat

SEQ ID NO: 68136 - DNA, 22 bp, Artificial Sequence
  chemically synthesized
ccagagtaagtggcagagaatt

SEQ ID NO: 68137 - DNA, 22 bp, Artificial Sequence
  chemically synthesized
gaaatttgatactccccataca

SEQ ID NO: 68138 - DNA, 22 bp, Artificial Sequence
  chemically synthesized
aaatttgatactccccatacaa

SEQ ID NO: 68139 - DNA, 22 bp, Artificial Sequence
  chemically synthesized
gatactccccatacaaggatcc

SEQ ID NO: 68140 - DNA, 22 bp, Artificial Sequence
  chemically synthesized
atactccccatacaaggatcca

SEQ ID NO: 68141 - DNA, 22 bp, Artificial Sequence
  chemically synthesized
cccatacaaggatccaagtacc

SEQ ID NO: 68142 - DNA, 22 bp, Artificial Sequence
  chemically synthesized
ttgcgtttatgctgggatcaca

SEQ ID NO: 68143 - DNA, 22 bp, Artificial Sequence
  chemically synthesized
cgtttatgctgggatcacagag

SEQ ID NO: 68144 - DNA, 22 bp, Artificial Sequence
  chemically synthesized
atgctgggatcacagagatacc

SEQ ID NO: 68145 - DNA, 22 bp, Artificial Sequence
  chemically synthesized
tgctgggatcacagagatacct

SEQ ID NO: 68146 - DNA, 22 bp, Artificial Sequence
  chemically synthesized
ggatcacagagatacctgggtt

SEQ ID NO: 68147 - DNA, 22 bp, Artificial Sequence
  chemically synthesized
ggttgcctgtgtttcctaagaa

SEQ ID NO: 68148 - DNA, 22 bp, Artificial Sequence
  chemically synthesized
cctgtgtttcctaagaaaagga

SEQ ID NO: 68149 - DNA, 22 bp, Artificial Sequence
  chemically synthesized
tgtttcctaagaaaaggatgtc

SEQ ID NO: 68150 - DNA, 22 bp, Artificial Sequence
  chemically synthesized
cctaagaaaaggatgtctgttt

SEQ ID NO: 68151 - DNA, 22 bp, Artificial Sequence
  chemically synthesized
ctaagaaaaggatgtctgtttt

SEQ ID NO: 68152 - DNA, 22 bp, Artificial Sequence
  chemically synthesized
agaaaaggatgtctgttttggc

SEQ ID NO: 68153 - DNA, 22 bp, Artificial Sequence
  chemically synthesized
ttttggcagcaaacttagtgaa

SEQ ID NO: 68154 - DNA, 22 bp, Artificial Sequence
  chemically synthesized
tggcagcaaacttagtgaacgg

SEQ ID NO: 68155 - DNA, 22 bp, Artificial Sequence
  chemically synthesized
ggcagcaaacttagtgaacggc

SEQ ID NO: 68156 - DNA, 22 bp, Artificial Sequence
  chemically synthesized
gcagcaaacttagtgaacggct

SEQ ID NO: 68157 - DNA, 22 bp, Artificial Sequence
  chemically synthesized
agtgaacggctgaggcaaaaac

SEQ ID NO: 68158 - DNA, 22 bp, Artificial Sequence
  chemically synthesized
gtgaacggctgaggcaaaaaca

SEQ ID NO: 68159 - DNA, 22 bp, Artificial Sequence
  chemically synthesized
aggcaaaaacaagtgcaaagat

SEQ ID NO: 68160 - DNA, 22 bp, Artificial Sequence
  chemically synthesized
tcagatttctcattgaaaaata

SEQ ID NO: 68161 - DNA, 22 bp, Artificial Sequence
  chemically synthesized
agatttctcattgaaaaatacc

SEQ ID NO: 68162 - DNA, 22 bp, Artificial Sequence
  chemically synthesized
ctcattgaaaaataccatgaca

SEQ ID NO: 68163 - DNA, 22 bp, Artificial Sequence
  chemically synthesized
tcattgaaaaataccatgacaa

SEQ ID NO: 68164 - DNA, 22 bp, Artificial Sequence
  chemically synthesized
attgaaaaataccatgacaaaa

SEQ ID NO: 68165 - DNA, 22 bp, Artificial Sequence
  chemically synthesized
aaaaataccatgacaaaatctg

SEQ ID NO: 68166 - DNA, 22 bp, Artificial Sequence
  chemically synthesized
tagtaattttacgccacactct

SEQ ID NO: 68167 - DNA, 22 bp, Artificial Sequence
  chemically synthesized
tacgccacactctcaattcact

SEQ ID NO: 68168 - DNA, 22 bp, Artificial Sequence
  chemically synthesized
acgccacactctcaattcactt

SEQ ID NO: 68169 - DNA, 22 bp, Artificial Sequence
  chemically synthesized
cgccacactctcaattcacttg

SEQ ID NO: 68170 - DNA, 22 bp, Artificial Sequence
  chemically synthesized
tcaattcacttgacgtaaacag

SEQ ID NO: 68171 - DNA, 22 bp, Artificial Sequence
  chemically synthesized
aattcacttgacgtaaacagtc

SEQ ID NO: 68172 - DNA, 22 bp, Artificial Sequence
  chemically synthesized
acttgacgtaaacagtcaaatg

SEQ ID NO: 68173 - DNA, 22 bp, Artificial Sequence
  chemically synthesized
gacgtaaacagtcaaatgtaga

SEQ ID NO: 68174 - DNA, 22 bp, Artificial Sequence
  chemically synthesized
acgtaaacagtcaaatgtagac

SEQ ID NO: 68175 - DNA, 22 bp, Artificial Sequence
  chemically synthesized
gtttgttaagtccggtcttcct

SEQ ID NO: 68176 - DNA, 22 bp, Artificial Sequence
  chemically synthesized
tttgttaagtccggtcttcctg

SEQ ID NO: 68177 - DNA, 22 bp, Artificial Sequence
  chemically synthesized
gttaagtccggtcttcctgctt

SEQ ID NO: 68178 - DNA, 22 bp, Artificial Sequence
  chemically synthesized
ttaagtccggtcttcctgcttg

SEQ ID NO: 68179 - DNA, 22 bp, Artificial Sequence
  chemically synthesized
agtccggtcttcctgcttgtgt

SEQ ID NO: 68180 - DNA, 22 bp, Artificial Sequence
  chemically synthesized
cctgcttgtgttggttcacttt

SEQ ID NO: 68181 - DNA, 22 bp, Artificial Sequence
  chemically synthesized
ctgcttgtgttggttcactttg

SEQ ID NO: 68182 - DNA, 22 bp, Artificial Sequence
  chemically synthesized
cttgtgttggttcactttgtgg

SEQ ID NO: 68183 - DNA, 22 bp, Artificial Sequence
  chemically synthesized
gtgttggttcactttgtggtgt

SEQ ID NO: 68184 - DNA, 22 bp, Artificial Sequence
  chemically synthesized
tgttggttcactttgtggtgtt

SEQ ID NO: 68185 - DNA, 22 bp, Artificial Sequence
  chemically synthesized
gttcactttgtggtgtttattt

SEQ ID NO: 68186 - DNA, 22 bp, Artificial Sequence
  chemically synthesized
actttgtggtgtttattttgtt

SEQ ID NO: 68187 - DNA, 22 bp, Artificial Sequence
  chemically synthesized
tgtggtgtttattttgttttgg

SEQ ID NO: 68188 - DNA, 22 bp, Artificial Sequence
  chemically synthesized
gtggtgtttattttgttttggg

SEQ ID NO: 68189 - DNA, 22 bp, Artificial Sequence
  chemically synthesized
tggtgtttattttgttttgggt

SEQ ID NO: 68190 - DNA, 22 bp, Artificial Sequence
  chemically synthesized
attttgttttgggtcagagagg

SEQ ID NO: 68191 - DNA, 22 bp, Artificial Sequence
  chemically synthesized
ttttgttttgggtcagagagga

SEQ ID NO: 68192 - DNA, 22 bp, Artificial Sequence
  chemically synthesized
tgttttgggtcagagaggatga

SEQ ID NO: 68193 - DNA, 22 bp, Artificial Sequence
  chemically synthesized
gttttgggtcagagaggatgaa

SEQ ID NO: 68194 - DNA, 22 bp, Artificial Sequence
  chemically synthesized
ttttgggtcagagaggatgaaa

SEQ ID NO: 68195 - DNA, 22 bp, Artificial Sequence
  chemically synthesized
tgggtcagagaggatgaaatgt

SEQ ID NO: 68196 - DNA, 22 bp, Artificial Sequence
  chemically synthesized
gggtcagagaggatgaaatgtc

SEQ ID NO: 68197 - DNA, 22 bp, Artificial Sequence
  chemically synthesized
ggtcagagaggatgaaatgtct

SEQ ID NO: 68198 - DNA, 22 bp, Artificial Sequence
  chemically synthesized
tgtagatgttctcaggctaggt

SEQ ID NO: 68199 - DNA, 22 bp, Artificial Sequence
  chemically synthesized
tagatgttctcaggctaggtgg

SEQ ID NO: 68200 - DNA, 22 bp, Artificial Sequence
  chemically synthesized
tcaggctaggtggtgcttccac

SEQ ID NO: 68201 - DNA, 22 bp, Artificial Sequence
  chemically synthesized
aggctaggtggtgcttccacca

SEQ ID NO: 68202 - DNA, 22 bp, Artificial Sequence
  chemically synthesized
ggtggtgcttccaccagggctt

SEQ ID NO: 68203 - DNA, 22 bp, Artificial Sequence
  chemically synthesized
ccaccagggcttccctctgcag

SEQ ID NO: 68204 - DNA, 22 bp, Artificial Sequence
  chemically synthesized
caccagggcttccctctgcagg

SEQ ID NO: 68205 - DNA, 22 bp, Artificial Sequence
  chemically synthesized
ccctctgcaggcctggtaacag

SEQ ID NO: 68206 - DNA, 22 bp, Artificial Sequence
  chemically synthesized
cctctgcaggcctggtaacagc

SEQ ID NO: 68207 - DNA, 22 bp, Artificial Sequence
  chemically synthesized
tgcaggcctggtaacagcagac

SEQ ID NO: 68208 - DNA, 22 bp, Artificial Sequence
  chemically synthesized
caggcctggtaacagcagacct

SEQ ID NO: 68209 - DNA, 22 bp, Artificial Sequence
  chemically synthesized
gtaacagcagacctatgctgtc

SEQ ID NO: 68210 - DNA, 22 bp, Artificial Sequence
  chemically synthesized
tgctgtctgtgtaagagccttc

SEQ ID NO: 68211 - DNA, 22 bp, Artificial Sequence
  chemically synthesized
tctgtgtaagagccttctcagc

SEQ ID NO: 68212 - DNA, 22 bp, Artificial Sequence
  chemically synthesized
tgtaagagccttctcagcagca

SEQ ID NO: 68213 - DNA, 22 bp, Artificial Sequence
  chemically synthesized
ctcagcagcacaccatcgttac

SEQ ID NO: 68214 - DNA, 22 bp, Artificial Sequence
  chemically synthesized
tcagcagcacaccatcgttacc

SEQ ID NO: 68215 - DNA, 22 bp, Artificial Sequence
  chemically synthesized
agcagcacaccatcgttaccca

SEQ ID NO: 68216 - DNA, 22 bp, Artificial Sequence
  chemically synthesized
cccaccaggctccttgcgaaag

SEQ ID NO: 68217 - DNA, 22 bp, Artificial Sequence
  chemically synthesized
cttgcgaaaggaaatcttgtcc

SEQ ID NO: 68218 - DNA, 22 bp, Artificial Sequence
  chemically synthesized
gcgaaaggaaatcttgtcccaa

SEQ ID NO: 68219 - DNA, 22 bp, Artificial Sequence
  chemically synthesized
cgaaaggaaatcttgtcccaac

SEQ ID NO: 68220 - DNA, 22 bp, Artificial Sequence
  chemically synthesized
gtcccaactgccttggctgtgc

SEQ ID NO: 68221 - DNA, 22 bp, Artificial Sequence
  chemically synthesized
tcccaactgccttggctgtgct

SEQ ID NO: 68222 - DNA, 22 bp, Artificial Sequence
  chemically synthesized
ccttggctgtgcttggcagtgt

SEQ ID NO: 68223 - DNA, 22 bp, Artificial Sequence
  chemically synthesized
ggctgtgcttggcagtgtgctc

SEQ ID NO: 68224 - DNA, 22 bp, Artificial Sequence
  chemically synthesized
gctgtgcttggcagtgtgctct

SEQ ID NO: 68225 - DNA, 22 bp, Artificial Sequence
  chemically synthesized
tgcttggcagtgtgctctatat

SEQ ID NO: 68226 - DNA, 22 bp, Artificial Sequence
  chemically synthesized
ggcagtgtgctctatataagga

SEQ ID NO: 68227 - DNA, 22 bp, Artificial Sequence
  chemically synthesized
gcagtgtgctctatataaggag

SEQ ID NO: 68228 - DNA, 22 bp, Artificial Sequence
  chemically synthesized
tatataaggagaacaggatgta

SEQ ID NO: 68229 - DNA, 22 bp, Artificial Sequence
  chemically synthesized
tataaggagaacaggatgtatt

SEQ ID NO: 68230 - DNA, 22 bp, Artificial Sequence
  chemically synthesized
tacacttgagacctgctatcct

SEQ ID NO: 68231 - DNA, 22 bp, Artificial Sequence
  chemically synthesized
acacttgagacctgctatccta

SEQ ID NO: 68232 - DNA, 22 bp, Artificial Sequence
  chemically synthesized
cacttgagacctgctatcctag

SEQ ID NO: 68233 - DNA, 22 bp, Artificial Sequence
  chemically synthesized
gagacctgctatcctagagtac

SEQ ID NO: 68234 - DNA, 22 bp, Artificial Sequence
  chemically synthesized
agacctgctatcctagagtaca

SEQ ID NO: 68235 - DNA, 22 bp, Artificial Sequence
  chemically synthesized
ctatcctagagtacaacaacaa

SEQ ID NO: 68236 - DNA, 22 bp, Artificial Sequence
  chemically synthesized
tcctagagtacaacaacaacac

SEQ ID NO: 68237 - DNA, 22 bp, Artificial Sequence
  chemically synthesized
gagtacaacaacaacacttcta

SEQ ID NO: 68238 - DNA, 22 bp, Artificial Sequence
  chemically synthesized
ctaagtgctcttaatattaagc

SEQ ID NO: 68239 - DNA, 22 bp, Artificial Sequence
  chemically synthesized
taagtgctcttaatattaagct

SEQ ID NO: 68240 - DNA, 22 bp, Artificial Sequence
  chemically synthesized
agtgctcttaatattaagctaa

SEQ ID NO: 68241 - DNA, 22 bp, Artificial Sequence
  chemically synthesized
ttaatattaagctaatggaaaa

SEQ ID NO: 68242 - DNA, 22 bp, Artificial Sequence
  chemically synthesized
aatattaagctaatggaaaaca

SEQ ID NO: 68243 - DNA, 22 bp, Artificial Sequence
  chemically synthesized
atattaagctaatggaaaacat

SEQ ID NO: 68244 - DNA, 22 bp, Artificial Sequence
  chemically synthesized
agctaatggaaaacatactgtt

SEQ ID NO: 68245 - DNA, 22 bp, Artificial Sequence
  chemically synthesized
atggaaaacatactgtttgttc

SEQ ID NO: 68246 - DNA, 22 bp, Artificial Sequence
  chemically synthesized
tttgttcaccatcaaagtctgt

SEQ ID NO: 68247 - DNA, 22 bp, Artificial Sequence
  chemically synthesized
gttcaccatcaaagtctgtttt

SEQ ID NO: 68248 - DNA, 22 bp, Artificial Sequence
  chemically synthesized
ttcaccatcaaagtctgttttt

SEQ ID NO: 68249 - DNA, 22 bp, Artificial Sequence
  chemically synthesized
accatcaaagtctgtttttctt

SEQ ID NO: 68250 - DNA, 22 bp, Artificial Sequence
  chemically synthesized
tttttcttgtctcccgccctcc

SEQ ID NO: 68251 - DNA, 22 bp, Artificial Sequence
  chemically synthesized
ttcttgtctcccgccctcccca

SEQ ID NO: 68252 - DNA, 22 bp, Artificial Sequence
  chemically synthesized
tcttgtctcccgccctccccaa

SEQ ID NO: 68253 - DNA, 22 bp, Artificial Sequence
  chemically synthesized
cttgtctcccgccctccccaat

SEQ ID NO: 68254 - DNA, 22 bp, Artificial Sequence
  chemically synthesized
ttgtctcccgccctccccaatc

SEQ ID NO: 68255 - DNA, 22 bp, Artificial Sequence
  chemically synthesized
gtctcccgccctccccaatcat

SEQ ID NO: 68256 - DNA, 22 bp, Artificial Sequence
  chemically synthesized
tctcccgccctccccaatcatc

SEQ ID NO: 68257 - DNA, 22 bp, Artificial Sequence
  chemically synthesized
ccgccctccccaatcatcatga

SEQ ID NO: 68258 - DNA, 22 bp, Artificial Sequence
  chemically synthesized
cccaatcatcatgaactccaaa

SEQ ID NO: 68259 - DNA, 22 bp, Artificial Sequence
  chemically synthesized
caaacctctagaacacacagag

SEQ ID NO: 68260 - DNA, 22 bp, Artificial Sequence
  chemically synthesized
tagaacacacagagcgtctcct

SEQ ID NO: 68261 - DNA, 22 bp, Artificial Sequence
  chemically synthesized
gaacacacagagcgtctcctgc

SEQ ID NO: 68262 - DNA, 22 bp, Artificial Sequence
  chemically synthesized
ctgcaccatctatcctccagtc

SEQ ID NO: 68263 - DNA, 22 bp, Artificial Sequence
  chemically synthesized
caccatctatcctccagtctgt

SEQ ID NO: 68264 - DNA, 22 bp, Artificial Sequence
  chemically synthesized
tcctccagtctgtctcaagatg

SEQ ID NO: 68265 - DNA, 22 bp, Artificial Sequence
  chemically synthesized
cagtctgtctcaagatggacag

SEQ ID NO: 68266 - DNA, 22 bp, Artificial Sequence
  chemically synthesized
tctcaagatggacagctacatg

SEQ ID NO: 68267 - DNA, 22 bp, Artificial Sequence
  chemically synthesized
aagatggacagctacatggtta

SEQ ID NO: 68268 - DNA, 22 bp, Artificial Sequence
  chemically synthesized
catggttagttagctagaggag

SEQ ID NO: 68269 - DNA, 22 bp, Artificial Sequence
  chemically synthesized
gttagctagaggaggacttgga

SEQ ID NO: 68270 - DNA, 22 bp, Artificial Sequence
  chemically synthesized
gctagaggaggacttggaaaag

SEQ ID NO: 68271 - DNA, 22 bp, Artificial Sequence
  chemically synthesized
gaggaggacttggaaaagctag

SEQ ID NO: 68272 - DNA, 22 bp, Artificial Sequence
  chemically synthesized
ggaaaagctaggcacttaccac

SEQ ID NO: 68273 - DNA, 22 bp, Artificial Sequence
  chemically synthesized
gaaaagctaggcacttaccaca

SEQ ID NO: 68274 - DNA, 22 bp, Artificial Sequence
  chemically synthesized
ggcacttaccacataaaccgta

SEQ ID NO: 68275 - DNA, 22 bp, Artificial Sequence
  chemically synthesized
accacataaaccgtaaaatccc

SEQ ID NO: 68276 - DNA, 22 bp, Artificial Sequence
  chemically synthesized
ccacataaaccgtaaaatcccc

SEQ ID NO: 68277 - DNA, 22 bp, Artificial Sequence
  chemically synthesized
cacaaaccaaattttcctcttc

SEQ ID NO: 68278 - DNA, 22 bp, Artificial Sequence
  chemically synthesized
tcctcttctcaaaaaaatctca

SEQ ID NO: 68279 - DNA, 22 bp, Artificial Sequence
  chemically synthesized
cctcttctcaaaaaaatctcag

SEQ ID NO: 68280 - DNA, 22 bp, Artificial Sequence
  chemically synthesized
ctcttctcaaaaaaatctcagt

SEQ ID NO: 68281 - DNA, 22 bp, Artificial Sequence
  chemically synthesized
ttctcaaaaaaatctcagtgct

SEQ ID NO: 68282 - DNA, 22 bp, Artificial Sequence
  chemically synthesized
ctcaaaaaaatctcagtgctac

SEQ ID NO: 68283 - DNA, 22 bp, Artificial Sequence
  chemically synthesized
tcaaaaaaatctcagtgctaca

SEQ ID NO: 68284 - DNA, 22 bp, Artificial Sequence
  chemically synthesized
aaaaaaatctcagtgctacaaa

SEQ ID NO: 68285 - DNA, 22 bp, Artificial Sequence
  chemically synthesized
agtgctacaaatgtttcattga

SEQ ID NO: 68286 - DNA, 22 bp, Artificial Sequence
  chemically synthesized
caaatgtttcattgactattag

SEQ ID NO: 68287 - DNA, 22 bp, Artificial Sequence
  chemically synthesized
cattgactattagattcatttt

SEQ ID NO: 68288 - DNA, 22 bp, Artificial Sequence
  chemically synthesized
attgactattagattcatttta

SEQ ID NO: 68289 - DNA, 22 bp, Artificial Sequence
  chemically synthesized
actattagattcattttattag

SEQ ID NO: 68290 - DNA, 22 bp, Artificial Sequence
  chemically synthesized
ttagattcattttattagtgtg

SEQ ID NO: 68291 - DNA, 22 bp, Artificial Sequence
  chemically synthesized
gattcattttattagtgtgaga

SEQ ID NO: 68292 - DNA, 22 bp, Artificial Sequence
  chemically synthesized
attttattagtgtgagaagtca

SEQ ID NO: 68293 - DNA, 22 bp, Artificial Sequence
  chemically synthesized
tattagtgtgagaagtcacttg

SEQ ID NO: 68294 - DNA, 22 bp, Artificial Sequence
  chemically synthesized
attagtgtgagaagtcacttgt

SEQ ID NO: 68295 - DNA, 22 bp, Artificial Sequence
  chemically synthesized
ttagtgtgagaagtcacttgtc

SEQ ID NO: 68296 - DNA, 22 bp, Artificial Sequence
  chemically synthesized
gtgtgagaagtcacttgtcttc

SEQ ID NO: 68297 - DNA, 22 bp, Artificial Sequence
  chemically synthesized
gtcttcaccagagtacaacaaa

SEQ ID NO: 68298 - DNA, 22 bp, Artificial Sequence
  chemically synthesized
tcttcaccagagtacaacaaag

SEQ ID NO: 68299 - DNA, 22 bp, Artificial Sequence
  chemically synthesized
caccagagtacaacaaagtgca

SEQ ID NO: 68300 - DNA, 22 bp, Artificial Sequence
  chemically synthesized
accagagtacaacaaagtgcag

SEQ ID NO: 68301 - DNA, 22 bp, Artificial Sequence
  chemically synthesized
ctgggtgctggcattattggaa

SEQ ID NO: 68302 - DNA, 22 bp, Artificial Sequence
  chemically synthesized
tgggtgctggcattattggaat

SEQ ID NO: 68303 - DNA, 22 bp, Artificial Sequence
  chemically synthesized
ggtgctggcattattggaatgc

SEQ ID NO: 68304 - DNA, 22 bp, Artificial Sequence
  chemically synthesized
gcattattggaatgctggttct

SEQ ID NO: 68305 - DNA, 22 bp, Artificial Sequence
  chemically synthesized
ttggaatgctggttctttcctt

SEQ ID NO: 68306 - DNA, 22 bp, Artificial Sequence
  chemically synthesized
gaatgctggttctttccttgtc

SEQ ID NO: 68307 - DNA, 22 bp, Artificial Sequence
  chemically synthesized
gttctttccttgtcatttaatg

SEQ ID NO: 68308 - DNA, 22 bp, Artificial Sequence
  chemically synthesized
tttccttgtcatttaatggtca

SEQ ID NO: 68309 - DNA, 22 bp, Artificial Sequence
  chemically synthesized
tccttgtcatttaatggtcaaa

SEQ ID NO: 68310 - DNA, 22 bp, Artificial Sequence
  chemically synthesized
ccttgtcatttaatggtcaaag

SEQ ID NO: 68311 - DNA, 22 bp, Artificial Sequence
  chemically synthesized
cttgtcatttaatggtcaaagt

SEQ ID NO: 68312 - DNA, 22 bp, Artificial Sequence
  chemically synthesized
gtcatttaatggtcaaagttat

SEQ ID NO: 68313 - DNA, 22 bp, Artificial Sequence
  chemically synthesized
tcatttaatggtcaaagttatt

SEQ ID NO: 68314 - DNA, 22 bp, Artificial Sequence
  chemically synthesized
aatggtcaaagttatttggacc

SEQ ID NO: 68315 - DNA, 22 bp, Artificial Sequence
  chemically synthesized
atggtcaaagttatttggaccc

SEQ ID NO: 68316 - DNA, 22 bp, Artificial Sequence
  chemically synthesized
tttggaccccagaagtctaatc

SEQ ID NO: 68317 - DNA, 22 bp, Artificial Sequence
  chemically synthesized
ggaccccagaagtctaatcttt

SEQ ID NO: 68318 - DNA, 22 bp, Artificial Sequence
  chemically synthesized
gaccccagaagtctaatcttta

SEQ ID NO: 68319 - DNA, 22 bp, Artificial Sequence
  chemically synthesized
atctttatcttccattgctttg

SEQ ID NO: 68320 - DNA, 22 bp, Artificial Sequence
  chemically synthesized
tatcttccattgctttgtattg

SEQ ID NO: 68321 - DNA, 22 bp, Artificial Sequence
  chemically synthesized
atcttccattgctttgtattgt

SEQ ID NO: 68322 - DNA, 22 bp, Artificial Sequence
  chemically synthesized
tcttccattgctttgtattgtg

SEQ ID NO: 68323 - DNA, 22 bp, Artificial Sequence
  chemically synthesized
ccattgctttgtattgtgagaa

SEQ ID NO: 68324 - DNA, 22 bp, Artificial Sequence
  chemically synthesized
cattgctttgtattgtgagaag

SEQ ID NO: 68325 - DNA, 22 bp, Artificial Sequence
  chemically synthesized
ctttgtattgtgagaagccaca

SEQ ID NO: 68326 - DNA, 22 bp, Artificial Sequence
  chemically synthesized
tgtattgtgagaagccacatct

SEQ ID NO: 68327 - DNA, 22 bp, Artificial Sequence
  chemically synthesized
gtattgtgagaagccacatctg

SEQ ID NO: 68328 - DNA, 22 bp, Artificial Sequence
  chemically synthesized
tattgtgagaagccacatctgt

SEQ ID NO: 68329 - DNA, 22 bp, Artificial Sequence
  chemically synthesized
tgagaagccacatctgtgtaag

SEQ ID NO: 68330 - DNA, 22 bp, Artificial Sequence
  chemically synthesized
tgtaaggtttccagttgacagg

SEQ ID NO: 68331 - DNA, 22 bp, Artificial Sequence
  chemically synthesized
ccagttgacaggattctagagt

SEQ ID NO: 68332 - DNA, 22 bp, Artificial Sequence
  chemically synthesized
cagttgacaggattctagagta

SEQ ID NO: 68333 - DNA, 22 bp, Artificial Sequence
  chemically synthesized
acaggattctagagtatggccc

SEQ ID NO: 68334 - DNA, 22 bp, Artificial Sequence
  chemically synthesized
tagagtatggcccagctcagtc

SEQ ID NO: 68335 - DNA, 22 bp, Artificial Sequence
  chemically synthesized
gagtatggcccagctcagtcca

SEQ ID NO: 68336 - DNA, 22 bp, Artificial Sequence
  chemically synthesized
agtccagaaatgcccaggtttc

SEQ ID NO: 68337 - DNA, 22 bp, Artificial Sequence
  chemically synthesized
cccctatcactgaaggcgctat

SEQ ID NO: 68338 - DNA, 22 bp, Artificial Sequence
  chemically synthesized
ccctatcactgaaggcgctatc

SEQ ID NO: 68339 - DNA, 22 bp, Artificial Sequence
  chemically synthesized
tcactgaaggcgctatcataaa

SEQ ID NO: 68340 - DNA, 22 bp, Artificial Sequence
  chemically synthesized
aaggcgctatcataaatatagc

SEQ ID NO: 68341 - DNA, 22 bp, Artificial Sequence
  chemically synthesized
tcataaatatagcatgggaaga

SEQ ID NO: 68342 - DNA, 22 bp, Artificial Sequence
  chemically synthesized
tgtcccataaaaaacgattcac

SEQ ID NO: 68343 - DNA, 22 bp, Artificial Sequence
  chemically synthesized
tcccataaaaaacgattcacaa

SEQ ID NO: 68344 - DNA, 22 bp, Artificial Sequence
  chemically synthesized
acaaatctactcatttcctatc

SEQ ID NO: 68345 - DNA, 22 bp, Artificial Sequence
  chemically synthesized
ctcatttcctatcagcattttg

SEQ ID NO: 68346 - DNA, 22 bp, Artificial Sequence
  chemically synthesized
atttcctatcagcattttgctt

SEQ ID NO: 68347 - DNA, 22 bp, Artificial Sequence
  chemically synthesized
cctatcagcattttgctttttg

SEQ ID NO: 68348 - DNA, 22 bp, Artificial Sequence
  chemically synthesized
ctatcagcattttgctttttgc

SEQ ID NO: 68349 - DNA, 22 bp, Artificial Sequence
  chemically synthesized
tcagcattttgctttttgcttg

SEQ ID NO: 68350 - DNA, 22 bp, Artificial Sequence
  chemically synthesized
tgctttttgcttgggtttgtct

SEQ ID NO: 68351 - DNA, 22 bp, Artificial Sequence
  chemically synthesized
gctttttgcttgggtttgtcta

SEQ ID NO: 68352 - DNA, 22 bp, Artificial Sequence
  chemically synthesized
ctttttgcttgggtttgtctat

SEQ ID NO: 68353 - DNA, 22 bp, Artificial Sequence
  chemically synthesized
tttgcttgggtttgtctataaa

SEQ ID NO: 68354 - DNA, 22 bp, Artificial Sequence
  chemically synthesized
ttgcttgggtttgtctataaag

SEQ ID NO: 68355 - DNA, 22 bp, Artificial Sequence
  chemically synthesized
tgcttgggtttgtctataaagt

SEQ ID NO: 68356 - DNA, 22 bp, Artificial Sequence
  chemically synthesized
gcttgggtttgtctataaagta

SEQ ID NO: 68357 - DNA, 22 bp, Artificial Sequence
  chemically synthesized
cttgggtttgtctataaagtaa

SEQ ID NO: 68358 - DNA, 22 bp, Artificial Sequence
  chemically synthesized
gggtttgtctataaagtaaagt

SEQ ID NO: 68359 - DNA, 22 bp, Artificial Sequence
  chemically synthesized
ggtttgtctataaagtaaagtt

SEQ ID NO: 68360 - DNA, 22 bp, Artificial Sequence
  chemically synthesized
gtctataaagtaaagttaatgt

SEQ ID NO: 68361 - DNA, 22 bp, Artificial Sequence
  chemically synthesized
tctataaagtaaagttaatgta

SEQ ID NO: 68362 - DNA, 22 bp, Artificial Sequence
  chemically synthesized
taaagtaaagttaatgtatgca

SEQ ID NO: 68363 - DNA, 22 bp, Artificial Sequence
  chemically synthesized
atgtatgcatgtaaaccagcct

SEQ ID NO: 68364 - DNA, 22 bp, Artificial Sequence
  chemically synthesized
gcagataaaatccccccatgtt

SEQ ID NO: 68365 - DNA, 22 bp, Artificial Sequence
  chemically synthesized
cagataaaatccccccatgttt

SEQ ID NO: 68366 - DNA, 22 bp, Artificial Sequence
  chemically synthesized
ccaggctacccacaatattacc

SEQ ID NO: 68367 - DNA, 22 bp, Artificial Sequence
  chemically synthesized
caggctacccacaatattacca

SEQ ID NO: 68368 - DNA, 22 bp, Artificial Sequence
  chemically synthesized
cccacaatattaccagttttcc

SEQ ID NO: 68369 - DNA, 22 bp, Artificial Sequence
  chemically synthesized
ccagttttccccttgctgctta

SEQ ID NO: 68370 - DNA, 22 bp, Artificial Sequence
  chemically synthesized
tccccttgctgcttacacatct

SEQ ID NO: 68371 - DNA, 22 bp, Artificial Sequence
  chemically synthesized
ccccttgctgcttacacatctt

SEQ ID NO: 68372 - DNA, 22 bp, Artificial Sequence
  chemically synthesized
cccttgctgcttacacatcttc

SEQ ID NO: 68373 - DNA, 22 bp, Artificial Sequence
  chemically synthesized
gctgcttacacatcttctttcc

SEQ ID NO: 68374 - DNA, 22 bp, Artificial Sequence
  chemically synthesized
ctgcttacacatcttctttcca

SEQ ID NO: 68375 - DNA, 22 bp, Artificial Sequence
  chemically synthesized
cttacacatcttctttccacaa

SEQ ID NO: 68376 - DNA, 22 bp, Artificial Sequence
  chemically synthesized
acacatcttctttccacaagac

SEQ ID NO: 68377 - DNA, 22 bp, Artificial Sequence
  chemically synthesized
cacatcttctttccacaagaca

SEQ ID NO: 68378 - DNA, 22 bp, Artificial Sequence
  chemically synthesized
ctttccacaagacaataatcaa

SEQ ID NO: 68379 - DNA, 22 bp, Artificial Sequence
  chemically synthesized
tttccacaagacaataatcaaa

SEQ ID NO: 68380 - DNA, 22 bp, Artificial Sequence
  chemically synthesized
tccacaagacaataatcaaaca

SEQ ID NO: 68381 - DNA, 22 bp, Artificial Sequence
  chemically synthesized
ccacaagacaataatcaaacaa

SEQ ID NO: 68382 - DNA, 22 bp, Artificial Sequence
  chemically synthesized
cacaagacaataatcaaacaac

SEQ ID NO: 68383 - DNA, 22 bp, Artificial Sequence
  chemically synthesized
tcccctttcctaaaacaaaccc

SEQ ID NO: 68384 - DNA, 22 bp, Artificial Sequence
  chemically synthesized
ccctttcctaaaacaaaccctt

SEQ ID NO: 68385 - DNA, 22 bp, Artificial Sequence
  chemically synthesized
tcctaaaacaaaccctttcact

SEQ ID NO: 68386 - DNA, 22 bp, Artificial Sequence
  chemically synthesized
cctaaaacaaaccctttcactt

SEQ ID NO: 68387 - DNA, 22 bp, Artificial Sequence
  chemically synthesized
ctaaaacaaaccctttcacttt

SEQ ID NO: 68388 - DNA, 22 bp, Artificial Sequence
  chemically synthesized
aaacaaaccctttcacttttgt

SEQ ID NO: 68389 - DNA, 22 bp, Artificial Sequence
  chemically synthesized
tcacttttgtcaaaaagaccga

SEQ ID NO: 68390 - DNA, 22 bp, Artificial Sequence
  chemically synthesized
cacttttgtcaaaaagaccgaa

SEQ ID NO: 68391 - DNA, 22 bp, Artificial Sequence
  chemically synthesized
acttttgtcaaaaagaccgaaa

SEQ ID NO: 68392 - DNA, 22 bp, Artificial Sequence
  chemically synthesized
ttgtcaaaaagaccgaaattga

SEQ ID NO: 68393 - DNA, 22 bp, Artificial Sequence
  chemically synthesized
tgtcaaaaagaccgaaattgaa

SEQ ID NO: 68394 - DNA, 22 bp, Artificial Sequence
  chemically synthesized
gtcaaaaagaccgaaattgaaa

SEQ ID NO: 68395 - DNA, 22 bp, Artificial Sequence
  chemically synthesized
tcaaaaagaccgaaattgaaaa

SEQ ID NO: 68396 - DNA, 22 bp, Artificial Sequence
  chemically synthesized
aaaacaaaacagaaactctggg

SEQ ID NO: 68397 - DNA, 22 bp, Artificial Sequence
  chemically synthesized
tgggaaataactcaccactctt

SEQ ID NO: 68398 - DNA, 22 bp, Artificial Sequence
  chemically synthesized
ggaaataactcaccactcttct

SEQ ID NO: 68399 - DNA, 22 bp, Artificial Sequence
  chemically synthesized
accactcttcttttgtttcagg

SEQ ID NO: 68400 - DNA, 22 bp, Artificial Sequence
  chemically synthesized
ttcttttgtttcaggccttggg

SEQ ID NO: 68401 - DNA, 22 bp, Artificial Sequence
  chemically synthesized
cttttgtttcaggccttgggcc

SEQ ID NO: 68402 - DNA, 22 bp, Artificial Sequence
  chemically synthesized
ttttgtttcaggccttgggcct

SEQ ID NO: 68403 - DNA, 22 bp, Artificial Sequence
  chemically synthesized
ttgtttcaggccttgggcctgt

SEQ ID NO: 68404 - DNA, 22 bp, Artificial Sequence
  chemically synthesized
tgtttcaggccttgggcctgtt

SEQ ID NO: 68405 - DNA, 22 bp, Artificial Sequence
  chemically synthesized
gtttcaggccttgggcctgtta

SEQ ID NO: 68406 - DNA, 22 bp, Artificial Sequence
  chemically synthesized
tttcaggccttgggcctgttaa

SEQ ID NO: 68407 - DNA, 22 bp, Artificial Sequence
  chemically synthesized
caggccttgggcctgttaacta

SEQ ID NO: 68408 - DNA, 22 bp, Artificial Sequence
  chemically synthesized
aggccttgggcctgttaactat

SEQ ID NO: 68409 - DNA, 22 bp, Artificial Sequence
  chemically synthesized
gggcctgttaactatctgcaag

SEQ ID NO: 68410 - DNA, 22 bp, Artificial Sequence
  chemically synthesized
ggcctgttaactatctgcaagg

SEQ ID NO: 68411 - DNA, 22 bp, Artificial Sequence
  chemically synthesized
ttaactatctgcaaggctgttg

SEQ ID NO: 68412 - DNA, 22 bp, Artificial Sequence
  chemically synthesized
actatctgcaaggctgttgtaa

SEQ ID NO: 68413 - DNA, 22 bp, Artificial Sequence
  chemically synthesized
tctgcaaggctgttgtaatgat

SEQ ID NO: 68414 - DNA, 22 bp, Artificial Sequence
  chemically synthesized
caaggctgttgtaatgatgttg

SEQ ID NO: 68415 - DNA, 22 bp, Artificial Sequence
  chemically synthesized
ttgtaatgatgttgtaatctat

SEQ ID NO: 68416 - DNA, 22 bp, Artificial Sequence
  chemically synthesized
taatgatgttgtaatctatttt

SEQ ID NO: 68417 - DNA, 22 bp, Artificial Sequence
  chemically synthesized
taatctattttaatggaattga

SEQ ID NO: 68418 - DNA, 22 bp, Artificial Sequence
  chemically synthesized
ttttaatggaattgaaatgtga

SEQ ID NO: 68419 - DNA, 22 bp, Artificial Sequence
  chemically synthesized
taatggaattgaaatgtgatat

SEQ ID NO: 68420 - DNA, 22 bp, Artificial Sequence
  chemically synthesized
aatggaattgaaatgtgatatc

SEQ ID NO: 68421 - DNA, 22 bp, Artificial Sequence
  chemically synthesized
atggaattgaaatgtgatatcc

SEQ ID NO: 68422 - DNA, 22 bp, Artificial Sequence
  chemically synthesized
aaatgtgatatcctgtggttta

SEQ ID NO: 68423 - DNA, 22 bp, Artificial Sequence
  chemically synthesized
tggtttatgatgcacgttgttt

SEQ ID NO: 68424 - DNA, 22 bp, Artificial Sequence
  chemically synthesized
atgatgcacgttgtttgtagct

SEQ ID NO: 68425 - DNA, 22 bp, Artificial Sequence
  chemically synthesized
tgatgcacgttgtttgtagctg

SEQ ID NO: 68426 - DNA, 22 bp, Artificial Sequence
  chemically synthesized
tttgtagctgtagtgcttgatt

SEQ ID NO: 68427 - DNA, 22 bp, Artificial Sequence
  chemically synthesized
gtagctgtagtgcttgattttg

SEQ ID NO: 68428 - DNA, 22 bp, Artificial Sequence
  chemically synthesized
tagctgtagtgcttgattttgg

SEQ ID NO: 68429 - DNA, 22 bp, Artificial Sequence
  chemically synthesized
tagtgcttgattttgggtttct

SEQ ID NO: 68430 - DNA, 22 bp, Artificial Sequence
  chemically synthesized
gattttgggtttctttcacaga

SEQ ID NO: 68431 - DNA, 22 bp, Artificial Sequence
  chemically synthesized
attttgggtttctttcacagat

SEQ ID NO: 68432 - DNA, 22 bp, Artificial Sequence
  chemically synthesized
tgggtttctttcacagataaac

SEQ ID NO: 68433 - DNA, 22 bp, Artificial Sequence
  chemically synthesized
gggtttctttcacagataaact

SEQ ID NO: 68434 - DNA, 22 bp, Artificial Sequence
  chemically synthesized
ggtttctttcacagataaactt

SEQ ID NO: 68435 - DNA, 22 bp, Artificial Sequence
  chemically synthesized
ctttcacagataaacttctgca

SEQ ID NO: 68436 - DNA, 22 bp, Artificial Sequence
  chemically synthesized
tttcacagataaacttctgcac

SEQ ID NO: 68437 - DNA, 22 bp, Artificial Sequence
  chemically synthesized
tcacagataaacttctgcactg

SEQ ID NO: 68438 - DNA, 22 bp, Artificial Sequence
  chemically synthesized
cacagataaacttctgcactgg

SEQ ID NO: 68439 - DNA, 22 bp, Artificial Sequence
  chemically synthesized
acagataaacttctgcactgga

SEQ ID NO: 68440 - DNA, 22 bp, Artificial Sequence
  chemically synthesized
ctgcactggaggggcctctcct

SEQ ID NO: 68441 - DNA, 22 bp, Artificial Sequence
  chemically synthesized
tgcactggaggggcctctcctc

SEQ ID NO: 68442 - DNA, 22 bp, Artificial Sequence
  chemically synthesized
cactggaggggcctctcctccc

SEQ ID NO: 68443 - DNA, 22 bp, Artificial Sequence
  chemically synthesized
gaggggcctctcctcccctcgt

SEQ ID NO: 68444 - DNA, 22 bp, Artificial Sequence
  chemically synthesized
tcctcccctcgttctgcacatg

SEQ ID NO: 68445 - DNA, 22 bp, Artificial Sequence
  chemically synthesized
ctcccctcgttctgcacatgga

SEQ ID NO: 68446 - DNA, 22 bp, Artificial Sequence
  chemically synthesized
ccctcgttctgcacatggagct

SEQ ID NO: 68447 - DNA, 22 bp, Artificial Sequence
  chemically synthesized
gttctgcacatggagctctaat

SEQ ID NO: 68448 - DNA, 22 bp, Artificial Sequence
  chemically synthesized
tgcacatggagctctaatcccc

SEQ ID NO: 68449 - DNA, 22 bp, Artificial Sequence
  chemically synthesized
cacatggagctctaatccccac

SEQ ID NO: 68450 - DNA, 22 bp, Artificial Sequence
  chemically synthesized
taatccccacgcctgggatgag

SEQ ID NO: 68451 - DNA, 22 bp, Artificial Sequence
  chemically synthesized
atccccacgcctgggatgagtg

SEQ ID NO: 68452 - DNA, 22 bp, Artificial Sequence
  chemically synthesized
ggatgagtgcagaatatgcccc

SEQ ID NO: 68453 - DNA, 22 bp, Artificial Sequence
  chemically synthesized
gtaagttgagccttatttcttc

SEQ ID NO: 68454 - DNA, 22 bp, Artificial Sequence
  chemically synthesized
taagttgagccttatttcttct

SEQ ID NO: 68455 - DNA, 22 bp, Artificial Sequence
  chemically synthesized
agccttatttcttctacaaatg

SEQ ID NO: 68456 - DNA, 22 bp, Artificial Sequence
  chemically synthesized
atttcttctacaaatgtccatg

SEQ ID NO: 68457 - DNA, 22 bp, Artificial Sequence
  chemically synthesized
tttcttctacaaatgtccatgt

SEQ ID NO: 68458 - DNA, 22 bp, Artificial Sequence
  chemically synthesized
cttctacaaatgtccatgtgta

SEQ ID NO: 68459 - DNA, 22 bp, Artificial Sequence
  chemically synthesized
ttctacaaatgtccatgtgtat

SEQ ID NO: 68460 - DNA, 22 bp, Artificial Sequence
  chemically synthesized
ctacaaatgtccatgtgtatag

SEQ ID NO: 68461 - DNA, 22 bp, Artificial Sequence
  chemically synthesized
tacaaatgtccatgtgtataga

SEQ ID NO: 68462 - DNA, 22 bp, Artificial Sequence
  chemically synthesized
caaatgtccatgtgtatagaga

SEQ ID NO: 68463 - DNA, 22 bp, Artificial Sequence
  chemically synthesized
ctggaaattgcccttacttttt

SEQ ID NO: 68464 - DNA, 22 bp, Artificial Sequence
  chemically synthesized
tggaaattgcccttacttttta

SEQ ID NO: 68465 - DNA, 22 bp, Artificial Sequence
  chemically synthesized
gaaattgcccttactttttaag

SEQ ID NO: 68466 - DNA, 22 bp, Artificial Sequence
  chemically synthesized
cccttactttttaagtactgaa

SEQ ID NO: 68467 - DNA, 22 bp, Artificial Sequence
  chemically synthesized
actttttaagtactgaaggagt

SEQ ID NO: 68468 - DNA, 22 bp, Artificial Sequence
  chemically synthesized
ctttttaagtactgaaggagtt

SEQ ID NO: 68469 - DNA, 22 bp, Artificial Sequence
  chemically synthesized
tttaagtactgaaggagttact

SEQ ID NO: 68470 - DNA, 22 bp, Artificial Sequence
  chemically synthesized
ttaagtactgaaggagttactt

SEQ ID NO: 68471 - DNA, 22 bp, Artificial Sequence
  chemically synthesized
taagtactgaaggagttacttc

SEQ ID NO: 68472 - DNA, 22 bp, Artificial Sequence
  chemically synthesized
aagtactgaaggagttacttcc

SEQ ID NO: 68473 - DNA, 22 bp, Artificial Sequence
  chemically synthesized
agtactgaaggagttacttcca

SEQ ID NO: 68474 - DNA, 22 bp, Artificial Sequence
  chemically synthesized
aaggagttacttccaaaataga

SEQ ID NO: 68475 - DNA, 22 bp, Artificial Sequence
  chemically synthesized
cttccaaaatagattgtcatat

SEQ ID NO: 68476 - DNA, 22 bp, Artificial Sequence
  chemically synthesized
ccaaaatagattgtcatatgta

SEQ ID NO: 68477 - DNA, 22 bp, Artificial Sequence
  chemically synthesized
caaaatagattgtcatatgtat

SEQ ID NO: 68478 - DNA, 22 bp, Artificial Sequence
  chemically synthesized
tcatatgtattattccattact

SEQ ID NO: 68479 - DNA, 22 bp, Artificial Sequence
  chemically synthesized
ttccattactcacttggcagcc

SEQ ID NO: 68480 - DNA, 22 bp, Artificial Sequence
  chemically synthesized
cattactcacttggcagccgct

SEQ ID NO: 68481 - DNA, 22 bp, Artificial Sequence
  chemically synthesized
ctcacttggcagccgctcccca

SEQ ID NO: 68482 - DNA, 22 bp, Artificial Sequence
  chemically synthesized
acttggcagccgctccccactc

SEQ ID NO: 68483 - DNA, 22 bp, Artificial Sequence
  chemically synthesized
ggcagccgctccccactccact

SEQ ID NO: 68484 - DNA, 22 bp, Artificial Sequence
  chemically synthesized
gcagccgctccccactccactc

SEQ ID NO: 68485 - DNA, 22 bp, Artificial Sequence
  chemically synthesized
cccactccactcagccccagag

SEQ ID NO: 68486 - DNA, 22 bp, Artificial Sequence
  chemically synthesized
cactcagccccagagggacttc

SEQ ID NO: 68487 - DNA, 22 bp, Artificial Sequence
  chemically synthesized
agccccagagggacttcttccc

SEQ ID NO: 68488 - DNA, 22 bp, Artificial Sequence
  chemically synthesized
cttccctcccctttttctttcc

SEQ ID NO: 68489 - DNA, 22 bp, Artificial Sequence
  chemically synthesized
ttccctcccctttttctttcct

SEQ ID NO: 68490 - DNA, 22 bp, Artificial Sequence
  chemically synthesized
ccctcccctttttctttcctca

SEQ ID NO: 68491 - DNA, 22 bp, Artificial Sequence
  chemically synthesized
cctcccctttttctttcctcac

SEQ ID NO: 68492 - DNA, 22 bp, Artificial Sequence
  chemically synthesized
ccctttttctttcctcactgga

SEQ ID NO: 68493 - DNA, 22 bp, Artificial Sequence
  chemically synthesized
tttctttcctcactggaggctg

SEQ ID NO: 68494 - DNA, 22 bp, Artificial Sequence
  chemically synthesized
ttctttcctcactggaggctgg

SEQ ID NO: 68495 - DNA, 22 bp, Artificial Sequence
  chemically synthesized
tctttcctcactggaggctggg

SEQ ID NO: 68496 - DNA, 22 bp, Artificial Sequence
  chemically synthesized
ctttcctcactggaggctggga

SEQ ID NO: 68497 - DNA, 22 bp, Artificial Sequence
  chemically synthesized
tttcctcactggaggctgggag

SEQ ID NO: 68498 - DNA, 22 bp, Artificial Sequence
  chemically synthesized
tcctcactggaggctgggagct

SEQ ID NO: 68499 - DNA, 22 bp, Artificial Sequence
  chemically synthesized
cctcactggaggctgggagctg

SEQ ID NO: 68500 - DNA, 22 bp, Artificial Sequence
  chemically synthesized
ctcactggaggctgggagctga

SEQ ID NO: 68501 - DNA, 22 bp, Artificial Sequence
  chemically synthesized
actggaggctgggagctgatag

SEQ ID NO: 68502 - DNA, 22 bp, Artificial Sequence
  chemically synthesized
gaggctgggagctgatagtagc

SEQ ID NO: 68503 - DNA, 22 bp, Artificial Sequence
  chemically synthesized
ggagctgatagtagctcatccc

SEQ ID NO: 68504 - DNA, 22 bp, Artificial Sequence
  chemically synthesized
atagtagctcatccctgtgggt

SEQ ID NO: 68505 - DNA, 22 bp, Artificial Sequence
  chemically synthesized
atccctgtgggtcttctcccca

SEQ ID NO: 68506 - DNA, 22 bp, Artificial Sequence
  chemically synthesized
tgggtcttctccccagggtctt

SEQ ID NO: 68507 - DNA, 22 bp, Artificial Sequence
  chemically synthesized
ctccccagggtcttgtcttgct

SEQ ID NO: 68508 - DNA, 22 bp, Artificial Sequence
  chemically synthesized
tccccagggtcttgtcttgctc

SEQ ID NO: 68509 - DNA, 22 bp, Artificial Sequence
  chemically synthesized
cccagggtcttgtcttgctccg

SEQ ID NO: 68510 - DNA, 22 bp, Artificial Sequence
  chemically synthesized
gtcttgctccgtggctagtgat

SEQ ID NO: 68511 - DNA, 22 bp, Artificial Sequence
  chemically synthesized
tcttgctccgtggctagtgatt

SEQ ID NO: 68512 - DNA, 22 bp, Artificial Sequence
  chemically synthesized
gctccgtggctagtgattgaag

SEQ ID NO: 68513 - DNA, 22 bp, Artificial Sequence
  chemically synthesized
ctccgtggctagtgattgaaga

SEQ ID NO: 68514 - DNA, 22 bp, Artificial Sequence
  chemically synthesized
cgtggctagtgattgaagatgc

SEQ ID NO: 68515 - DNA, 22 bp, Artificial Sequence
  chemically synthesized
gtgattgaagatgcctgtgcct

SEQ ID NO: 68516 - DNA, 22 bp, Artificial Sequence
  chemically synthesized
aagatgcctgtgcctctggagc

SEQ ID NO: 68517 - DNA, 22 bp, Artificial Sequence
  chemically synthesized
tgcctctggagcccattttatt

SEQ ID NO: 68518 - DNA, 22 bp, Artificial Sequence
  chemically synthesized
tggagcccattttattactgga

SEQ ID NO: 68519 - DNA, 22 bp, Artificial Sequence
  chemically synthesized
gagcccattttattactggaca

SEQ ID NO: 68520 - DNA, 22 bp, Artificial Sequence
  chemically synthesized
tattactggacattcactcctg

SEQ ID NO: 68521 - DNA, 22 bp, Artificial Sequence
  chemically synthesized
attactggacattcactcctgt

SEQ ID NO: 68522 - DNA, 22 bp, Artificial Sequence
  chemically synthesized
ttactggacattcactcctgtg

SEQ ID NO: 68523 - DNA, 22 bp, Artificial Sequence
  chemically synthesized
ctggacattcactcctgtggcc

SEQ ID NO: 68524 - DNA, 22 bp, Artificial Sequence
  chemically synthesized
gacattcactcctgtggcctca

SEQ ID NO: 68525 - DNA, 22 bp, Artificial Sequence
  chemically synthesized
actcctgtggcctcatttagga

SEQ ID NO: 68526 - DNA, 22 bp, Artificial Sequence
  chemically synthesized
ctgtggcctcatttaggacttt

SEQ ID NO: 68527 - DNA, 22 bp, Artificial Sequence
  chemically synthesized
tggcctcatttaggactttggg

SEQ ID NO: 68528 - DNA, 22 bp, Artificial Sequence
  chemically synthesized
atttaggactttgggtatagtc

SEQ ID NO: 68529 - DNA, 22 bp, Artificial Sequence
  chemically synthesized
aggactttgggtatagtccatg

SEQ ID NO: 68530 - DNA, 22 bp, Artificial Sequence
  chemically synthesized
ggactttgggtatagtccatgg

SEQ ID NO: 68531 - DNA, 22 bp, Artificial Sequence
  chemically synthesized
tgggtatagtccatggcacaca

SEQ ID NO: 68532 - DNA, 22 bp, Artificial Sequence
  chemically synthesized
gggtatagtccatggcacacat

SEQ ID NO: 68533 - DNA, 22 bp, Artificial Sequence
  chemically synthesized
ggtatagtccatggcacacatc

SEQ ID NO: 68534 - DNA, 22 bp, Artificial Sequence
  chemically synthesized
tagccaaggccagaatcaaaag

SEQ ID NO: 68535 - DNA, 22 bp, Artificial Sequence
  chemically synthesized
agccaaggccagaatcaaaagg

SEQ ID NO: 68536 - DNA, 22 bp, Artificial Sequence
  chemically synthesized
gccaaggccagaatcaaaagga

SEQ ID NO: 68537 - DNA, 22 bp, Artificial Sequence
  chemically synthesized
agggttattccagagttattcc

SEQ ID NO: 68538 - DNA, 22 bp, Artificial Sequence
  chemically synthesized
gggttattccagagttattcca

SEQ ID NO: 68539 - DNA, 22 bp, Artificial Sequence
  chemically synthesized
ttccagagttattccaatgcat

SEQ ID NO: 68540 - DNA, 22 bp, Artificial Sequence
  chemically synthesized
cagagttattccaatgcatatt

SEQ ID NO: 68541 - DNA, 22 bp, Artificial Sequence
  chemically synthesized
ttccaatgcatattccttatgt

SEQ ID NO: 68542 - DNA, 22 bp, Artificial Sequence
  chemically synthesized
caatgcatattccttatgtatt

SEQ ID NO: 68543 - DNA, 22 bp, Artificial Sequence
  chemically synthesized
cttatgtatttacatgtgtatt

SEQ ID NO: 68544 - DNA, 22 bp, Artificial Sequence
  chemically synthesized
atgtatttacatgtgtatttga

SEQ ID NO: 68545 - DNA, 22 bp, Artificial Sequence
  chemically synthesized
tgtatttacatgtgtatttgaa

SEQ ID NO: 68546 - DNA, 22 bp, Artificial Sequence
  chemically synthesized
acatgtgtatttgaacatagta

SEQ ID NO: 68547 - DNA, 22 bp, Artificial Sequence
  chemically synthesized
catgtgtatttgaacatagtat

SEQ ID NO: 68548 - DNA, 22 bp, Artificial Sequence
  chemically synthesized
gaacatagtatatgttgtatat

SEQ ID NO: 68549 - DNA, 22 bp, Artificial Sequence
  chemically synthesized
aacatagtatatgttgtatatt

SEQ ID NO: 68550 - DNA, 22 bp, Artificial Sequence
  chemically synthesized
tatattcatgcccacacataat

SEQ ID NO: 68551 - DNA, 22 bp, Artificial Sequence
  chemically synthesized
atgcccacacataattttgact

SEQ ID NO: 68552 - DNA, 22 bp, Artificial Sequence
  chemically synthesized
tgactaatttttctcctggttt

SEQ ID NO: 68553 - DNA, 22 bp, Artificial Sequence
  chemically synthesized
gactaatttttctcctggtttt

SEQ ID NO: 68554 - DNA, 22 bp, Artificial Sequence
  chemically synthesized
actaatttttctcctggtttta

SEQ ID NO: 68555 - DNA, 22 bp, Artificial Sequence
  chemically synthesized
atttttctcctggttttagaga

SEQ ID NO: 68556 - DNA, 22 bp, Artificial Sequence
  chemically synthesized
ttctcctggttttagagaaaaa

SEQ ID NO: 68557 - DNA, 22 bp, Artificial Sequence
  chemically synthesized
tctcctggttttagagaaaaat

SEQ ID NO: 68558 - DNA, 22 bp, Artificial Sequence
  chemically synthesized
ctcctggttttagagaaaaatg

SEQ ID NO: 68559 - DNA, 22 bp, Artificial Sequence
  chemically synthesized
tcctggttttagagaaaaatgc

SEQ ID NO: 68560 - DNA, 22 bp, Artificial Sequence
  chemically synthesized
ctggttttagagaaaaatgcac

SEQ ID NO: 68561 - DNA, 22 bp, Artificial Sequence
  chemically synthesized
gttttagagaaaaatgcacatc

SEQ ID NO: 68562 - DNA, 22 bp, Artificial Sequence
  chemically synthesized
tagagaaaaatgcacatcattg

SEQ ID NO: 68563 - DNA, 22 bp, Artificial Sequence
  chemically synthesized
agagaaaaatgcacatcattgt

SEQ ID NO: 68564 - DNA, 22 bp, Artificial Sequence
  chemically synthesized
gagaaaaatgcacatcattgta

SEQ ID NO: 68565 - DNA, 22 bp, Artificial Sequence
  chemically synthesized
tagttaaaatgtgaaggctcta

SEQ ID NO: 68566 - DNA, 22 bp, Artificial Sequence
  chemically synthesized
aaatgtgaaggctctactatca

SEQ ID NO: 68567 - DNA, 22 bp, Artificial Sequence
  chemically synthesized
tactatcaccaccaccaccacc

SEQ ID NO: 68568 - DNA, 22 bp, Artificial Sequence
  chemically synthesized
ctatcaccaccaccaccaccac

SEQ ID NO: 68569 - DNA, 22 bp, Artificial Sequence
  chemically synthesized
tcaccaccaccaccaccaccat

SEQ ID NO: 68570 - DNA, 22 bp, Artificial Sequence
  chemically synthesized
ccaccatcaccaccaccaccac

SEQ ID NO: 68571 - DNA, 22 bp, Artificial Sequence
  chemically synthesized
ccaccaccaccatcaccaccag

SEQ ID NO: 68572 - DNA, 22 bp, Artificial Sequence
  chemically synthesized
ccaccaccaccaccatcaccac

SEQ ID NO: 68573 - DNA, 22 bp, Artificial Sequence
  chemically synthesized
ccaccaccatcactaccaccac

SEQ ID NO: 68574 - DNA, 22 bp, Artificial Sequence
  chemically synthesized
ccaccaccaccatcaccaccag

SEQ ID NO: 68575 - DNA, 22 bp, Artificial Sequence
  chemically synthesized
ccaccaccaccaccaccaccat

SEQ ID NO: 68576 - DNA, 22 bp, Artificial Sequence
  chemically synthesized
ccaccaccatcactaccaccac

SEQ ID NO: 68577 - DNA, 22 bp, Artificial Sequence
  chemically synthesized
ccaccaccaccatcaccaccag

SEQ ID NO: 68578 - DNA, 22 bp, Artificial Sequence
  chemically synthesized
caccaccaccattaccaccacc

SEQ ID NO: 68579 - DNA, 22 bp, Artificial Sequence
  chemically synthesized
ccaccaccatcactaccaccac

SEQ ID NO: 68580 - DNA, 22 bp, Artificial Sequence
  chemically synthesized
ccaccaccaccatcaccaccag

SEQ ID NO: 68581 - DNA, 22 bp, Artificial Sequence
  chemically synthesized
ccaccaccatcactaccaccac

SEQ ID NO: 68582 - DNA, 22 bp, Artificial Sequence
  chemically synthesized
ccaccaccaccaccatcaccac

SEQ ID NO: 68583 - DNA, 22 bp, Artificial Sequence
  chemically synthesized
ccaccaccatcactaccaccac

SEQ ID NO: 68584 - DNA, 22 bp, Artificial Sequence
  chemically synthesized
ccaccaccaccatcaccagtac

SEQ ID NO: 68585 - DNA, 22 bp, Artificial Sequence
  chemically synthesized
ccaccaccatcaccaccaccac

SEQ ID NO: 68586 - DNA, 22 bp, Artificial Sequence
  chemically synthesized
ccaccaccatcactaccaccac

SEQ ID NO: 68587 - DNA, 22 bp, Artificial Sequence
  chemically synthesized
ccaccaccaccatcaccagtac

SEQ ID NO: 68588 - DNA, 22 bp, Artificial Sequence
  chemically synthesized
ccaccaccatcactaccaccac

SEQ ID NO: 68589 - DNA, 22 bp, Artificial Sequence
  chemically synthesized
ccaccaccaccaccatcaccac

SEQ ID NO: 68590 - DNA, 22 bp, Artificial Sequence
  chemically synthesized
ccaccaccatcactaccaccac

SEQ ID NO: 68591 - DNA, 22 bp, Artificial Sequence
  chemically synthesized
ccaccaccaccaccatcaccac

SEQ ID NO: 68592 - DNA, 22 bp, Artificial Sequence
  chemically synthesized
ccaccaccatcactaccaccac

SEQ ID NO: 68593 - DNA, 22 bp, Artificial Sequence
  chemically synthesized
ccaccaccaccatcaccagtac

SEQ ID NO: 68594 - DNA, 22 bp, Artificial Sequence
  chemically synthesized
ccaccaccatcatcaccaccac

SEQ ID NO: 68595 - DNA, 22 bp, Artificial Sequence
  chemically synthesized
ccaccaccatttacttgttcaa

SEQ ID NO: 68596 - DNA, 22 bp, Artificial Sequence
  chemically synthesized
acttgttcaagtgagcttttat

SEQ ID NO: 68597 - DNA, 22 bp, Artificial Sequence
  chemically synthesized
cttgttcaagtgagcttttata

SEQ ID NO: 68598 - DNA, 22 bp, Artificial Sequence
  chemically synthesized
gttcaagtgagcttttatagta

SEQ ID NO: 68599 - DNA, 22 bp, Artificial Sequence
  chemically synthesized
ttcaagtgagcttttatagtag

SEQ ID NO: 68600 - DNA, 22 bp, Artificial Sequence
  chemically synthesized
aagtgagcttttatagtaggga

SEQ ID NO: 68601 - DNA, 22 bp, Artificial Sequence
  chemically synthesized
ttatagtagggaccattttatg

SEQ ID NO: 68602 - DNA, 22 bp, Artificial Sequence
  chemically synthesized
tatagtagggaccattttatga

SEQ ID NO: 68603 - DNA, 22 bp, Artificial Sequence
  chemically synthesized
atagtagggaccattttatgaa

SEQ ID NO: 68604 - DNA, 22 bp, Artificial Sequence
  chemically synthesized
tagtagggaccattttatgaaa

SEQ ID NO: 68605 - DNA, 22 bp, Artificial Sequence
  chemically synthesized
tatgaaacttaaatttgtccat

SEQ ID NO: 68606 - DNA, 22 bp, Artificial Sequence
  chemically synthesized
atgaaacttaaatttgtccatt

SEQ ID NO: 68607 - DNA, 22 bp, Artificial Sequence
  chemically synthesized
tgaaacttaaatttgtccattt

SEQ ID NO: 68608 - DNA, 22 bp, Artificial Sequence
  chemically synthesized
aaatttgtccatttatacaaat

SEQ ID NO: 68609 - DNA, 22 bp, Artificial Sequence
  chemically synthesized
aatttgtccatttatacaaatg

SEQ ID NO: 68610 - DNA, 22 bp, Artificial Sequence
  chemically synthesized
gtccatttatacaaatgttttc

SEQ ID NO: 68611 - DNA, 22 bp, Artificial Sequence
  chemically synthesized
tccatttatacaaatgttttct

SEQ ID NO: 68612 - DNA, 22 bp, Artificial Sequence
  chemically synthesized
atacaaatgttttctgaaagat

SEQ ID NO: 68613 - DNA, 22 bp, Artificial Sequence
  chemically synthesized
tacaaatgttttctgaaagata

SEQ ID NO: 68614 - DNA, 22 bp, Artificial Sequence
  chemically synthesized
tctgaaagatactgttttagaa

SEQ ID NO: 68615 - DNA, 22 bp, Artificial Sequence
  chemically synthesized
ctgaaagatactgttttagaaa

SEQ ID NO: 68616 - DNA, 22 bp, Artificial Sequence
  chemically synthesized
tgaaagatactgttttagaaaa

SEQ ID NO: 68617 - DNA, 22 bp, Artificial Sequence
  chemically synthesized
aaagatactgttttagaaaata

SEQ ID NO: 68618 - DNA, 22 bp, Artificial Sequence
  chemically synthesized
ttttagaaaataatacagtttg

SEQ ID NO: 68619 - DNA, 22 bp, Artificial Sequence
  chemically synthesized
tagaaaataatacagtttgctt

SEQ ID NO: 68620 - DNA, 22 bp, Artificial Sequence
  chemically synthesized
agaaaataatacagtttgcttc

SEQ ID NO: 68621 - DNA, 22 bp, Artificial Sequence
  chemically synthesized
gaaaataatacagtttgcttct

SEQ ID NO: 68622 - DNA, 22 bp, Artificial Sequence
  chemically synthesized
gcttctctgtgtaggaacacat

SEQ ID NO: 68623 - DNA, 22 bp, Artificial Sequence
  chemically synthesized
cttctctgtgtaggaacacatg

SEQ ID NO: 68624 - DNA, 22 bp, Artificial Sequence
  chemically synthesized
ctctgtgtaggaacacatggta

SEQ ID NO: 68625 - DNA, 22 bp, Artificial Sequence
  chemically synthesized
tctgtgtaggaacacatggtat

SEQ ID NO: 68626 - DNA, 22 bp, Artificial Sequence
  chemically synthesized
tgtgtaggaacacatggtatga

SEQ ID NO: 68627 - DNA, 22 bp, Artificial Sequence
  chemically synthesized
tgtaggaacacatggtatgaat

SEQ ID NO: 68628 - DNA, 22 bp, Artificial Sequence
  chemically synthesized
aaaggttagggggtgggcagtg

SEQ ID NO: 68629 - DNA, 22 bp, Artificial Sequence
  chemically synthesized
gggggtgggcagtgattccacc

SEQ ID NO: 68630 - DNA, 22 bp, Artificial Sequence
  chemically synthesized
caccctaaacacaaaaaagcag

SEQ ID NO: 68631 - DNA, 22 bp, Artificial Sequence
  chemically synthesized
aacacaaaaaagcaggttcaag

SEQ ID NO: 68632 - DNA, 22 bp, Artificial Sequence
  chemically synthesized
aagaagaaaagaagtgtgacat

SEQ ID NO: 68633 - DNA, 22 bp, Artificial Sequence
  chemically synthesized
atttttatttgaaagtaaatga

SEQ ID NO: 68634 - DNA, 22 bp, Artificial Sequence
  chemically synthesized
ttatttgaaagtaaatgaaaaa

SEQ ID NO: 68635 - DNA, 22 bp, Artificial Sequence
  chemically synthesized
tatttgaaagtaaatgaaaaat

SEQ ID NO: 68636 - DNA, 22 bp, Artificial Sequence
  chemically synthesized
atttgaaagtaaatgaaaaata

SEQ ID NO: 68637 - DNA, 22 bp, Artificial Sequence
  chemically synthesized
tttgaaagtaaatgaaaaataa

SEQ ID NO: 68638 - DNA, 22 bp, Artificial Sequence
  chemically synthesized
gaaagtaaatgaaaaataacct

SEQ ID NO: 68639 - DNA, 22 bp, Artificial Sequence
  chemically synthesized
aaagtaaatgaaaaataacctg

SEQ ID NO: 68640 - DNA, 22 bp, Artificial Sequence
  chemically synthesized
ctgtggaaagaaaaaaaaagaa

SEQ ID NO: 68641 - DNA, 22 bp, Artificial Sequence
  chemically synthesized
tggaaagaaaaaaaaagaaaag

SEQ ID NO: 68642 - DNA, 22 bp, Artificial Sequence
  chemically synthesized
aggctctaagggggactgtttt

SEQ ID NO: 68643 - DNA, 22 bp, Artificial Sequence
  chemically synthesized
taagggggactgtttttagatg

SEQ ID NO: 68644 - DNA, 22 bp, Artificial Sequence
  chemically synthesized
agggggactgtttttagatggg

SEQ ID NO: 68645 - DNA, 22 bp, Artificial Sequence
  chemically synthesized
tttttagatgggagggagatga

SEQ ID NO: 68646 - DNA, 22 bp, Artificial Sequence
  chemically synthesized
ttagatgggagggagatgacac

SEQ ID NO: 68647 - DNA, 22 bp, Artificial Sequence
  chemically synthesized
tagatgggagggagatgacact

SEQ ID NO: 68648 - DNA, 22 bp, Artificial Sequence
  chemically synthesized
agatgggagggagatgacactt

SEQ ID NO: 68649 - DNA, 22 bp, Artificial Sequence
  chemically synthesized
gatgggagggagatgacactta

SEQ ID NO: 68650 - DNA, 22 bp, Artificial Sequence
  chemically synthesized
acccatcttgtaaatggtatct

SEQ ID NO: 68651 - DNA, 22 bp, Artificial Sequence
  chemically synthesized
cccatcttgtaaatggtatctg

SEQ ID NO: 68652 - DNA, 22 bp, Artificial Sequence
  chemically synthesized
gtaaatggtatctgaagagcag

SEQ ID NO: 68653 - DNA, 22 bp, Artificial Sequence
  chemically synthesized
taaatggtatctgaagagcagg

SEQ ID NO: 68654 - DNA, 22 bp, Artificial Sequence
  chemically synthesized
aagagcagggcatgcaccctga

SEQ ID NO: 68655 - DNA, 22 bp, Artificial Sequence
  chemically synthesized
agaccagattcaaagccagttg

SEQ ID NO: 68656 - DNA, 22 bp, Artificial Sequence
  chemically synthesized
aaagccagttgtttatttttgt

SEQ ID NO: 68657 - DNA, 22 bp, Artificial Sequence
  chemically synthesized
tttatttttgttaactcctagg

SEQ ID NO: 68658 - DNA, 22 bp, Artificial Sequence
  chemically synthesized
atttttgttaactcctaggtaa

SEQ ID NO: 68659 - DNA, 22 bp, Artificial Sequence
  chemically synthesized
tttttgttaactcctaggtaat

SEQ ID NO: 68660 - DNA, 22 bp, Artificial Sequence
  chemically synthesized
ttgttaactcctaggtaatcct

SEQ ID NO: 68661 - DNA, 22 bp, Artificial Sequence
  chemically synthesized
tgttaactcctaggtaatccta

SEQ ID NO: 68662 - DNA, 22 bp, Artificial Sequence
  chemically synthesized
gttaactcctaggtaatcctag

SEQ ID NO: 68663 - DNA, 22 bp, Artificial Sequence
  chemically synthesized
ttaactcctaggtaatcctagg

SEQ ID NO: 68664 - DNA, 22 bp, Artificial Sequence
  chemically synthesized
actcctaggtaatcctaggtaa

SEQ ID NO: 68665 - DNA, 22 bp, Artificial Sequence
  chemically synthesized
ctaggtaatcctaggtaacaaa

SEQ ID NO: 68666 - DNA, 22 bp, Artificial Sequence
  chemically synthesized
ggtaatcctaggtaacaaagag

SEQ ID NO: 68667 - DNA, 22 bp, Artificial Sequence
  chemically synthesized
ggtaacaaagagttattgtgtg

SEQ ID NO: 68668 - DNA, 22 bp, Artificial Sequence
  chemically synthesized
ttgtgtgaatttcataagccct

SEQ ID NO: 68669 - DNA, 22 bp, Artificial Sequence
  chemically synthesized
tgtgaatttcataagccctcag

SEQ ID NO: 68670 - DNA, 22 bp, Artificial Sequence
  chemically synthesized
cataagccctcaggtcctgagg

SEQ ID NO: 68671 - DNA, 22 bp, Artificial Sequence
  chemically synthesized
ataagccctcaggtcctgaggg

SEQ ID NO: 68672 - DNA, 22 bp, Artificial Sequence
  chemically synthesized
aggtcctgagggctgggtggtt

SEQ ID NO: 68673 - DNA, 22 bp, Artificial Sequence
  chemically synthesized
agggctgggtggttcaggggtt

SEQ ID NO: 68674 - DNA, 22 bp, Artificial Sequence
  chemically synthesized
ggtggttcaggggttaaaagca

SEQ ID NO: 68675 - DNA, 22 bp, Artificial Sequence
  chemically synthesized
aggggttaaaagcacctcatct

SEQ ID NO: 68676 - DNA, 22 bp, Artificial Sequence
  chemically synthesized
aaagcacctcatctgctccctt

SEQ ID NO: 68677 - DNA, 22 bp, Artificial Sequence
  chemically synthesized
atctgctcccttcccccaagct

SEQ ID NO: 68678 - DNA, 22 bp, Artificial Sequence
  chemically synthesized
ctcccttcccccaagctgggcc

SEQ ID NO: 68679 - DNA, 22 bp, Artificial Sequence
  chemically synthesized
ccttcccccaagctgggcctaa

SEQ ID NO: 68680 - DNA, 22 bp, Artificial Sequence
  chemically synthesized
cccccaagctgggcctaagcct

SEQ ID NO: 68681 - DNA, 22 bp, Artificial Sequence
  chemically synthesized
ccccaagctgggcctaagcctg

SEQ ID NO: 68682 - DNA, 22 bp, Artificial Sequence
  chemically synthesized
ggcctaagcctgggttaggtca

SEQ ID NO: 68683 - DNA, 22 bp, Artificial Sequence
  chemically synthesized
agcctgggttaggtcacagatt

SEQ ID NO: 68684 - DNA, 22 bp, Artificial Sequence
  chemically synthesized
ggttaggtcacagattgcagaa

SEQ ID NO: 68685 - DNA, 22 bp, Artificial Sequence
  chemically synthesized
ggtcacagattgcagaaggttt

SEQ ID NO: 68686 - DNA, 22 bp, Artificial Sequence
  chemically synthesized
cagaaggtttaggaggttgggc

SEQ ID NO: 68687 - DNA, 22 bp, Artificial Sequence
  chemically synthesized
aggaggttgggctcacggtttc

SEQ ID NO: 68688 - DNA, 22 bp, Artificial Sequence
  chemically synthesized
ggaggttgggctcacggtttct

SEQ ID NO: 68689 - DNA, 22 bp, Artificial Sequence
  chemically synthesized
ggctcacggtttctagtccctg

SEQ ID NO: 68690 - DNA, 22 bp, Artificial Sequence
  chemically synthesized
acggtttctagtccctgcatgc

SEQ ID NO: 68691 - DNA, 22 bp, Artificial Sequence
  chemically synthesized
ctagtccctgcatgctggctgg

SEQ ID NO: 68692 - DNA, 22 bp, Artificial Sequence
  chemically synthesized
tagtccctgcatgctggctggg

SEQ ID NO: 68693 - DNA, 22 bp, Artificial Sequence
  chemically synthesized
gtccctgcatgctggctgggtg

SEQ ID NO: 68694 - DNA, 22 bp, Artificial Sequence
  chemically synthesized
catgctggctgggtggggagag

SEQ ID NO: 68695 - DNA, 22 bp, Artificial Sequence
  chemically synthesized
gctgggtggggagagctctcct

SEQ ID NO: 68696 - DNA, 22 bp, Artificial Sequence
  chemically synthesized
ggtggggagagctctcctgttg

SEQ ID NO: 68697 - DNA, 22 bp, Artificial Sequence
  chemically synthesized
tcctgttgctgggggcatctgg

SEQ ID NO: 68698 - DNA, 22 bp, Artificial Sequence
  chemically synthesized
ctgttgctgggggcatctgggg

SEQ ID NO: 68699 - DNA, 22 bp, Artificial Sequence
  chemically synthesized
ttgctgggggcatctggggcct

SEQ ID NO: 68700 - DNA, 22 bp, Artificial Sequence
  chemically synthesized
ctgggggcatctggggcctgca

SEQ ID NO: 68701 - DNA, 22 bp, Artificial Sequence
  chemically synthesized
ggggcatctggggcctgcatgg

SEQ ID NO: 68702 - DNA, 22 bp, Artificial Sequence
  chemically synthesized
gggcctgcatggggctgtggaa

SEQ ID NO: 68703 - DNA, 22 bp, Artificial Sequence
  chemically synthesized
catggggctgtggaaacggagc

SEQ ID NO: 68704 - DNA, 22 bp, Artificial Sequence
  chemically synthesized
tggaaacggagccacttttgga

SEQ ID NO: 68705 - DNA, 22 bp, Artificial Sequence
  chemically synthesized
ttggagggaagggatagaaggg

SEQ ID NO: 68706 - DNA, 22 bp, Artificial Sequence
  chemically synthesized
tggagggaagggatagaaggga

SEQ ID NO: 68707 - DNA, 22 bp, Artificial Sequence
  chemically synthesized
ggagggaagggatagaagggag

SEQ ID NO: 68708 - DNA, 22 bp, Artificial Sequence
  chemically synthesized
gagggaagggatagaagggagt

SEQ ID NO: 68709 - DNA, 22 bp, Artificial Sequence
  chemically synthesized
agcagttcagaggagggtggag

SEQ ID NO: 68710 - DNA, 22 bp, Artificial Sequence
  chemically synthesized
agaggagggtggagttgagagg

SEQ ID NO: 68711 - DNA, 22 bp, Artificial Sequence
  chemically synthesized
agaggccaagggctgttgccag

SEQ ID NO: 68712 - DNA, 22 bp, Artificial Sequence
  chemically synthesized
ttgccagggaaacatagttctc

SEQ ID NO: 68713 - DNA, 22 bp, Artificial Sequence
  chemically synthesized
ccagggaaacatagttctcggt

SEQ ID NO: 68714 - DNA, 22 bp, Artificial Sequence
  chemically synthesized
tcggtcttcagcctggtcttcc

SEQ ID NO: 68715 - DNA, 22 bp, Artificial Sequence
  chemically synthesized
ggtcttcagcctggtcttcctg

SEQ ID NO: 68716 - DNA, 22 bp, Artificial Sequence
  chemically synthesized
cagcctggtcttcctgagggct

SEQ ID NO: 68717 - DNA, 22 bp, Artificial Sequence
  chemically synthesized
agcctggtcttcctgagggctg

SEQ ID NO: 68718 - DNA, 22 bp, Artificial Sequence
  chemically synthesized
gtcttcctgagggctgggagtt

SEQ ID NO: 68719 - DNA, 22 bp, Artificial Sequence
  chemically synthesized
cctgagggctgggagtttgatt

SEQ ID NO: 68720 - DNA, 22 bp, Artificial Sequence
  chemically synthesized
ctgagggctgggagtttgattt

SEQ ID NO: 68721 - DNA, 22 bp, Artificial Sequence
  chemically synthesized
agggctgggagtttgatttgac

SEQ ID NO: 68722 - DNA, 22 bp, Artificial Sequence
  chemically synthesized
ggagtttgatttgactggtagg

SEQ ID NO: 68723 - DNA, 22 bp, Artificial Sequence
  chemically synthesized
gatttgactggtaggaaagtct

SEQ ID NO: 68724 - DNA, 22 bp, Artificial Sequence
  chemically synthesized
atttgactggtaggaaagtctg

SEQ ID NO: 68725 - DNA, 22 bp, Artificial Sequence
  chemically synthesized
gactggtaggaaagtctgagct

SEQ ID NO: 68726 - DNA, 22 bp, Artificial Sequence
  chemically synthesized
actggtaggaaagtctgagctt

SEQ ID NO: 68727 - DNA, 22 bp, Artificial Sequence
  chemically synthesized
gtaggaaagtctgagcttgata

SEQ ID NO: 68728 - DNA, 22 bp, Artificial Sequence
  chemically synthesized
agcttgatagggaacccctgtc

SEQ ID NO: 68729 - DNA, 22 bp, Artificial Sequence
  chemically synthesized
gatagggaacccctgtcctctc

SEQ ID NO: 68730 - DNA, 22 bp, Artificial Sequence
  chemically synthesized
atagggaacccctgtcctctcc

SEQ ID NO: 68731 - DNA, 22 bp, Artificial Sequence
  chemically synthesized
tcctctcccaccttcccacaaa

SEQ ID NO: 68732 - DNA, 22 bp, Artificial Sequence
  chemically synthesized
tcccaccttcccacaaagggag

SEQ ID NO: 68733 - DNA, 22 bp, Artificial Sequence
  chemically synthesized
ccaccttcccacaaagggaggg

SEQ ID NO: 68734 - DNA, 22 bp, Artificial Sequence
  chemically synthesized
cccacaaagggagggtacatag

SEQ ID NO: 68735 - DNA, 22 bp, Artificial Sequence
  chemically synthesized
ccacaaagggagggtacatagt

SEQ ID NO: 68736 - DNA, 22 bp, Artificial Sequence
  chemically synthesized
gctggtgcccctgctggcagga

SEQ ID NO: 68737 - DNA, 22 bp, Artificial Sequence
  chemically synthesized
ctggtgcccctgctggcaggac

SEQ ID NO: 68738 - DNA, 22 bp, Artificial Sequence
  chemically synthesized
gtgcccctgctggcaggaccaa

SEQ ID NO: 68739 - DNA, 22 bp, Artificial Sequence
  chemically synthesized
ctggcaggaccaatttaggagt

SEQ ID NO: 68740 - DNA, 22 bp, Artificial Sequence
  chemically synthesized
gcaggaccaatttaggagtgac

SEQ ID NO: 68741 - DNA, 22 bp, Artificial Sequence
  chemically synthesized
aggagtgaccagaacaaggtat

SEQ ID NO: 68742 - DNA, 22 bp, Artificial Sequence
  chemically synthesized
ggagtgaccagaacaaggtatg

SEQ ID NO: 68743 - DNA, 22 bp, Artificial Sequence
  chemically synthesized
tgggggtccagaaagctctaga

SEQ ID NO: 68744 - DNA, 22 bp, Artificial Sequence
  chemically synthesized
tagaacaaacctgatgcccatt

SEQ ID NO: 68745 - DNA, 22 bp, Artificial Sequence
  chemically synthesized
gaacaaacctgatgcccattcc

SEQ ID NO: 68746 - DNA, 22 bp, Artificial Sequence
  chemically synthesized
atgcccattccacttggcggca

SEQ ID NO: 68747 - DNA, 22 bp, Artificial Sequence
  chemically synthesized
cacttggcggcattaacctgct

SEQ ID NO: 68748 - DNA, 22 bp, Artificial Sequence
  chemically synthesized
ggcggcattaacctgctgcccc

SEQ ID NO: 68749 - DNA, 22 bp, Artificial Sequence
  chemically synthesized
gcggcattaacctgctgcccct

SEQ ID NO: 68750 - DNA, 22 bp, Artificial Sequence
  chemically synthesized
acctgctgcccctggcttccag

SEQ ID NO: 68751 - DNA, 22 bp, Artificial Sequence
  chemically synthesized
ctgcccctggcttccagagctc

SEQ ID NO: 68752 - DNA, 22 bp, Artificial Sequence
  chemically synthesized
cccctggcttccagagctcata

SEQ ID NO: 68753 - DNA, 22 bp, Artificial Sequence
  chemically synthesized
gcttccagagctcatagcactt

SEQ ID NO: 68754 - DNA, 22 bp, Artificial Sequence
  chemically synthesized
ccagagctcatagcacttccct

SEQ ID NO: 68755 - DNA, 22 bp, Artificial Sequence
  chemically synthesized
cagagctcatagcacttccctg

SEQ ID NO: 68756 - DNA, 22 bp, Artificial Sequence
  chemically synthesized
atagcacttccctgtggccact

SEQ ID NO: 68757 - DNA, 22 bp, Artificial Sequence
  chemically synthesized
ccctgtggccactctgctgtgt

SEQ ID NO: 68758 - DNA, 22 bp, Artificial Sequence
  chemically synthesized
cctgtggccactctgctgtgtg

SEQ ID NO: 68759 - DNA, 22 bp, Artificial Sequence
  chemically synthesized
tggccactctgctgtgtgccag

SEQ ID NO: 68760 - DNA, 22 bp, Artificial Sequence
  chemically synthesized
tgctgtgtgccagtcacccctg

SEQ ID NO: 68761 - DNA, 22 bp, Artificial Sequence
  chemically synthesized
ctgtgtgccagtcacccctgct

SEQ ID NO: 68762 - DNA, 22 bp, Artificial Sequence
  chemically synthesized
tgtgccagtcacccctgctctt

SEQ ID NO: 68763 - DNA, 22 bp, Artificial Sequence
  chemically synthesized
ctctttaactagagcctccttt

SEQ ID NO: 68764 - DNA, 22 bp, Artificial Sequence
  chemically synthesized
tttaactagagcctccttttgg

SEQ ID NO: 68765 - DNA, 22 bp, Artificial Sequence
  chemically synthesized
taactagagcctccttttggcc

SEQ ID NO: 68766 - DNA, 22 bp, Artificial Sequence
  chemically synthesized
aactagagcctccttttggcct

SEQ ID NO: 68767 - DNA, 22 bp, Artificial Sequence
  chemically synthesized
actagagcctccttttggcctg

SEQ ID NO: 68768 - DNA, 22 bp, Artificial Sequence
  chemically synthesized
gagcctccttttggcctgggtt

SEQ ID NO: 68769 - DNA, 22 bp, Artificial Sequence
  chemically synthesized
cttttggcctgggttaaggcct

SEQ ID NO: 68770 - DNA, 22 bp, Artificial Sequence
  chemically synthesized
ttggcctgggttaaggcctgga

SEQ ID NO: 68771 - DNA, 22 bp, Artificial Sequence
  chemically synthesized
tggcctgggttaaggcctggac

SEQ ID NO: 68772 - DNA, 22 bp, Artificial Sequence
  chemically synthesized
ggcctgggttaaggcctggact

SEQ ID NO: 68773 - DNA, 22 bp, Artificial Sequence
  chemically synthesized
gcctgggttaaggcctggactg

SEQ ID NO: 68774 - DNA, 22 bp, Artificial Sequence
  chemically synthesized
ggttaaggcctggactgggacc

SEQ ID NO: 68775 - DNA, 22 bp, Artificial Sequence
  chemically synthesized
aggcctggactgggaccttcct

SEQ ID NO: 68776 - DNA, 22 bp, Artificial Sequence
  chemically synthesized
gactgggaccttcctctggaag

SEQ ID NO: 68777 - DNA, 22 bp, Artificial Sequence
  chemically synthesized
ggaccttcctctggaagccgtt

SEQ ID NO: 68778 - DNA, 22 bp, Artificial Sequence
  chemically synthesized
cctctggaagccgttcggggtg

SEQ ID NO: 68779 - DNA, 22 bp, Artificial Sequence
  chemically synthesized
ctctggaagccgttcggggtgt

SEQ ID NO: 68780 - DNA, 22 bp, Artificial Sequence
  chemically synthesized
tggaagccgttcggggtgtgta

SEQ ID NO: 68781 - DNA, 22 bp, Artificial Sequence
  chemically synthesized
gaagccgttcggggtgtgtaat

SEQ ID NO: 68782 - DNA, 22 bp, Artificial Sequence
  chemically synthesized
ggggtgtgtaatgtggttagtc

SEQ ID NO: 68783 - DNA, 22 bp, Artificial Sequence
  chemically synthesized
gtcattaccctcagtaattaat

SEQ ID NO: 68784 - DNA, 22 bp, Artificial Sequence
  chemically synthesized
ccctcagtaattaatcacccct

SEQ ID NO: 68785 - DNA, 22 bp, Artificial Sequence
  chemically synthesized
agtaattaatcacccctggtag

SEQ ID NO: 68786 - DNA, 22 bp, Artificial Sequence
  chemically synthesized
atcacccctggtagtaatgaaa

SEQ ID NO: 68787 - DNA, 22 bp, Artificial Sequence
  chemically synthesized
gtagtaatgaaaactcacattc

SEQ ID NO: 68788 - DNA, 22 bp, Artificial Sequence
  chemically synthesized
acattcacattcgacctgatag

SEQ ID NO: 68789 - DNA, 22 bp, Artificial Sequence
  chemically synthesized
acattcgacctgatagtttaca

SEQ ID NO: 68790 - DNA, 22 bp, Artificial Sequence
  chemically synthesized
gacctgatagtttacagagggc

SEQ ID NO: 68791 - DNA, 22 bp, Artificial Sequence
  chemically synthesized
atagtttacagagggcttttat

SEQ ID NO: 68792 - DNA, 22 bp, Artificial Sequence
  chemically synthesized
acagagggcttttatatacttc

SEQ ID NO: 68793 - DNA, 22 bp, Artificial Sequence
  chemically synthesized
cagagggcttttatatacttct

SEQ ID NO: 68794 - DNA, 22 bp, Artificial Sequence
  chemically synthesized
ttatatacttctgtcatttgaa

SEQ ID NO: 68795 - DNA, 22 bp, Artificial Sequence
  chemically synthesized
tatatacttctgtcatttgaac

SEQ ID NO: 68796 - DNA, 22 bp, Artificial Sequence
  chemically synthesized
atatacttctgtcatttgaact

SEQ ID NO: 68797 - DNA, 22 bp, Artificial Sequence
  chemically synthesized
tatacttctgtcatttgaactt

SEQ ID NO: 68798 - DNA, 22 bp, Artificial Sequence
  chemically synthesized
ctgtcatttgaacttcccaaca

SEQ ID NO: 68799 - DNA, 22 bp, Artificial Sequence
  chemically synthesized
tgtcatttgaacttcccaacaa

SEQ ID NO: 68800 - DNA, 22 bp, Artificial Sequence
  chemically synthesized
tcatttgaacttcccaacaatt

SEQ ID NO: 68801 - DNA, 22 bp, Artificial Sequence
  chemically synthesized
gaacttcccaacaattcttaca

SEQ ID NO: 68802 - DNA, 22 bp, Artificial Sequence
  chemically synthesized
aacttcccaacaattcttacag

SEQ ID NO: 68803 - DNA, 22 bp, Artificial Sequence
  chemically synthesized
cccaacaattcttacaggtact

SEQ ID NO: 68804 - DNA, 22 bp, Artificial Sequence
  chemically synthesized
ccaacaattcttacaggtactg

SEQ ID NO: 68805 - DNA, 22 bp, Artificial Sequence
  chemically synthesized
ttacaggtactgtttttatgct

SEQ ID NO: 68806 - DNA, 22 bp, Artificial Sequence
  chemically synthesized
acaggtactgtttttatgctca

SEQ ID NO: 68807 - DNA, 22 bp, Artificial Sequence
  chemically synthesized
caggtactgtttttatgctcat

SEQ ID NO: 68808 - DNA, 22 bp, Artificial Sequence
  chemically synthesized
tttttatgctcattttacagat

SEQ ID NO: 68809 - DNA, 22 bp, Artificial Sequence
  chemically synthesized
ttatgctcattttacagatagg

SEQ ID NO: 68810 - DNA, 22 bp, Artificial Sequence
  chemically synthesized
tatgctcattttacagatagga

SEQ ID NO: 68811 - DNA, 22 bp, Artificial Sequence
  chemically synthesized
atgctcattttacagataggaa

SEQ ID NO: 68812 - DNA, 22 bp, Artificial Sequence
  chemically synthesized
tgctcattttacagataggaat

SEQ ID NO: 68813 - DNA, 22 bp, Artificial Sequence
  chemically synthesized
attttacagataggaattccaa

SEQ ID NO: 68814 - DNA, 22 bp, Artificial Sequence
  chemically synthesized
tacagataggaattccaagact

SEQ ID NO: 68815 - DNA, 22 bp, Artificial Sequence
  chemically synthesized
acagataggaattccaagactc

SEQ ID NO: 68816 - DNA, 22 bp, Artificial Sequence
  chemically synthesized
cagataggaattccaagactca

SEQ ID NO: 68817 - DNA, 22 bp, Artificial Sequence
  chemically synthesized
caagactcagagaaatcaaatg

SEQ ID NO: 68818 - DNA, 22 bp, Artificial Sequence
  chemically synthesized
agagaaatcaaatgactatccc

SEQ ID NO: 68819 - DNA, 22 bp, Artificial Sequence
  chemically synthesized
tcccagagttacaatctagtgg

SEQ ID NO: 68820 - DNA, 22 bp, Artificial Sequence
  chemically synthesized
caatctagtggataatagagct

SEQ ID NO: 68821 - DNA, 22 bp, Artificial Sequence
  chemically synthesized
gtggataatagagctaggcctc

SEQ ID NO: 68822 - DNA, 22 bp, Artificial Sequence
  chemically synthesized
ggcctccagtctcagacctcct

SEQ ID NO: 68823 - DNA, 22 bp, Artificial Sequence
  chemically synthesized
cagtctcagacctccttgttct

SEQ ID NO: 68824 - DNA, 22 bp, Artificial Sequence
  chemically synthesized
agacctccttgttcttctgaat

SEQ ID NO: 68825 - DNA, 22 bp, Artificial Sequence
  chemically synthesized
cttgttcttctgaatcttgagg

SEQ ID NO: 68826 - DNA, 22 bp, Artificial Sequence
  chemically synthesized
gttcttctgaatcttgaggctt

SEQ ID NO: 68827 - DNA, 22 bp, Artificial Sequence
  chemically synthesized
ttcttctgaatcttgaggctta

SEQ ID NO: 68828 - DNA, 22 bp, Artificial Sequence
  chemically synthesized
ttctgaatcttgaggcttagat

SEQ ID NO: 68829 - DNA, 22 bp, Artificial Sequence
  chemically synthesized
ctgaatcttgaggcttagatca

SEQ ID NO: 68830 - DNA, 22 bp, Artificial Sequence
  chemically synthesized
tgaatcttgaggcttagatcac

SEQ ID NO: 68831 - DNA, 22 bp, Artificial Sequence
  chemically synthesized
aatcttgaggcttagatcacat

SEQ ID NO: 68832 - DNA, 22 bp, Artificial Sequence
  chemically synthesized
gaggcttagatcacatgacttt

SEQ ID NO: 68833 - DNA, 22 bp, Artificial Sequence
  chemically synthesized
aggcttagatcacatgactttt

SEQ ID NO: 68834 - DNA, 22 bp, Artificial Sequence
  chemically synthesized
agatcacatgactttttcacat

SEQ ID NO: 68835 - DNA, 22 bp, Artificial Sequence
  chemically synthesized
gatcacatgactttttcacatt

SEQ ID NO: 68836 - DNA, 22 bp, Artificial Sequence
  chemically synthesized
tttcacattggtgacatactag

SEQ ID NO: 68837 - DNA, 22 bp, Artificial Sequence
  chemically synthesized
ttcacattggtgacatactaga

SEQ ID NO: 68838 - DNA, 22 bp, Artificial Sequence
  chemically synthesized
tcacattggtgacatactagaa

SEQ ID NO: 68839 - DNA, 22 bp, Artificial Sequence
  chemically synthesized
cacattggtgacatactagaaa

SEQ ID NO: 68840 - DNA, 22 bp, Artificial Sequence
  chemically synthesized
acattggtgacatactagaaat

SEQ ID NO: 68841 - DNA, 22 bp, Artificial Sequence
  chemically synthesized
gtgacatactagaaatgggggt

SEQ ID NO: 68842 - DNA, 22 bp, Artificial Sequence
  chemically synthesized
gaaatgggggtcattccttccc

SEQ ID NO: 68843 - DNA, 22 bp, Artificial Sequence
  chemically synthesized
cttcccataaagtaaaatgaaa

SEQ ID NO: 68844 - DNA, 22 bp, Artificial Sequence
  chemically synthesized
cccataaagtaaaatgaaataa

SEQ ID NO: 68845 - DNA, 22 bp, Artificial Sequence
  chemically synthesized
ccataaagtaaaatgaaataaa

SEQ ID NO: 68846 - DNA, 22 bp, Artificial Sequence
  chemically synthesized
atagctgattttaacccttttg

SEQ ID NO: 68847 - DNA, 22 bp, Artificial Sequence
  chemically synthesized
attttaacccttttgatgtctc

SEQ ID NO: 68848 - DNA, 22 bp, Artificial Sequence
  chemically synthesized
taacccttttgatgtctcaagt

SEQ ID NO: 68849 - DNA, 22 bp, Artificial Sequence
  chemically synthesized
aacccttttgatgtctcaagtt

SEQ ID NO: 68850 - DNA, 22 bp, Artificial Sequence
  chemically synthesized
acccttttgatgtctcaagttc

SEQ ID NO: 68851 - DNA, 22 bp, Artificial Sequence
  chemically synthesized
ttgatgtctcaagttcctatgc

SEQ ID NO: 68852 - DNA, 22 bp, Artificial Sequence
  chemically synthesized
tgatgtctcaagttcctatgct

SEQ ID NO: 68853 - DNA, 22 bp, Artificial Sequence
  chemically synthesized
gatgtctcaagttcctatgctt

SEQ ID NO: 68854 - DNA, 22 bp, Artificial Sequence
  chemically synthesized
atgtctcaagttcctatgctta

SEQ ID NO: 68855 - DNA, 22 bp, Artificial Sequence
  chemically synthesized
aagttcctatgcttaggggcca

SEQ ID NO: 68856 - DNA, 22 bp, Artificial Sequence
  chemically synthesized
ctatgcttaggggccaggtgtc

SEQ ID NO: 68857 - DNA, 22 bp, Artificial Sequence
  chemically synthesized
tgcttaggggccaggtgtcagt

SEQ ID NO: 68858 - DNA, 22 bp, Artificial Sequence
  chemically synthesized
aggggccaggtgtcagtttatt

SEQ ID NO: 68859 - DNA, 22 bp, Artificial Sequence
  chemically synthesized
ggggccaggtgtcagtttattg

SEQ ID NO: 68860 - DNA, 22 bp, Artificial Sequence
  chemically synthesized
attgctctaaatcaaaacaatc

SEQ ID NO: 68861 - DNA, 22 bp, Artificial Sequence
  chemically synthesized
ttgctctaaatcaaaacaatcc

SEQ ID NO: 68862 - DNA, 22 bp, Artificial Sequence
  chemically synthesized
ctctaaatcaaaacaatccccg

SEQ ID NO: 68863 - DNA, 22 bp, Artificial Sequence
  chemically synthesized
taaatcaaaacaatccccgtaa

SEQ ID NO: 68864 - DNA, 22 bp, Artificial Sequence
  chemically synthesized
aatcaaaacaatccccgtaaat

SEQ ID NO: 68865 - DNA, 22 bp, Artificial Sequence
  chemically synthesized
tcaaattgagaagttgattttc

SEQ ID NO: 68866 - DNA, 22 bp, Artificial Sequence
  chemically synthesized
aaattgagaagttgattttcat

SEQ ID NO: 68867 - DNA, 22 bp, Artificial Sequence
  chemically synthesized
agaagttgattttcatcagagt

SEQ ID NO: 68868 - DNA, 22 bp, Artificial Sequence
  chemically synthesized
attttcatcagagtaaatgaag

SEQ ID NO: 68869 - DNA, 22 bp, Artificial Sequence
  chemically synthesized
tcatcagagtaaatgaagaata

SEQ ID NO: 68870 - DNA, 22 bp, Artificial Sequence
  chemically synthesized
catcagagtaaatgaagaatat

SEQ ID NO: 68871 - DNA, 22 bp, Artificial Sequence
  chemically synthesized
atcagagtaaatgaagaatatt

SEQ ID NO: 68872 - DNA, 22 bp, Artificial Sequence
  chemically synthesized
ttatattttacacatcaataaa

SEQ ID NO: 68873 - DNA, 22 bp, Artificial Sequence
  chemically synthesized
tattttacacatcaataaatca

SEQ ID NO: 68874 - DNA, 22 bp, Artificial Sequence
  chemically synthesized
tacacatcaataaatcaatgta

SEQ ID NO: 68875 - DNA, 22 bp, Artificial Sequence
  chemically synthesized
acacatcaataaatcaatgtag

SEQ ID NO: 68876 - DNA, 22 bp, Artificial Sequence
  chemically synthesized
cacatcaataaatcaatgtagc

SEQ ID NO: 68877 - DNA, 22 bp, Artificial Sequence
  chemically synthesized
attttgccacacaggaaatcaa

SEQ ID NO: 68878 - DNA, 22 bp, Artificial Sequence
  chemically synthesized
tgccacacaggaaatcaattcc

SEQ ID NO: 68879 - DNA, 22 bp, Artificial Sequence
  chemically synthesized
gccacacaggaaatcaattcca

SEQ ID NO: 68880 - DNA, 22 bp, Artificial Sequence
  chemically synthesized
ccacacaggaaatcaattccag

SEQ ID NO: 68881 - DNA, 22 bp, Artificial Sequence
  chemically synthesized
cagtctttctaaatcatcaaag

SEQ ID NO: 68882 - DNA, 22 bp, Artificial Sequence
  chemically synthesized
tctaaatcatcaaagatgttat

SEQ ID NO: 68883 - DNA, 22 bp, Artificial Sequence
  chemically synthesized
ctaaatcatcaaagatgttatg

SEQ ID NO: 68884 - DNA, 22 bp, Artificial Sequence
  chemically synthesized
taaatcatcaaagatgttatga

SEQ ID NO: 68885 - DNA, 22 bp, Artificial Sequence
  chemically synthesized
aatcatcaaagatgttatgaac

SEQ ID NO: 68886 - DNA, 22 bp, Artificial Sequence
  chemically synthesized
tgaacaaagtaatttcacaaat

SEQ ID NO: 68887 - DNA, 22 bp, Artificial Sequence
  chemically synthesized
cacaaattatggcaagtaacac

SEQ ID NO: 68888 - DNA, 22 bp, Artificial Sequence
  chemically synthesized
acaaattatggcaagtaacaca

SEQ ID NO: 68889 - DNA, 22 bp, Artificial Sequence
  chemically synthesized
tggcaagtaacacatttattga

SEQ ID NO: 68890 - DNA, 22 bp, Artificial Sequence
  chemically synthesized
attgatgactgcagtttaggaa

SEQ ID NO: 68891 - DNA, 22 bp, Artificial Sequence
  chemically synthesized
ttgatgactgcagtttaggaat

SEQ ID NO: 68892 - DNA, 22 bp, Artificial Sequence
  chemically synthesized
atgactgcagtttaggaattta

SEQ ID NO: 68893 - DNA, 22 bp, Artificial Sequence
  chemically synthesized
cagtttaggaatttagaatctg

SEQ ID NO: 68894 - DNA, 22 bp, Artificial Sequence
  chemically synthesized
aggaatttagaatctgtgagca

SEQ ID NO: 68895 - DNA, 22 bp, Artificial Sequence
  chemically synthesized
ggaatttagaatctgtgagcac

SEQ ID NO: 68896 - DNA, 22 bp, Artificial Sequence
  chemically synthesized
agaatctgtgagcactgtaata

SEQ ID NO: 68897 - DNA, 22 bp, Artificial Sequence
  chemically synthesized
gaatctgtgagcactgtaatat

SEQ ID NO: 68898 - DNA, 22 bp, Artificial Sequence
  chemically synthesized
tgagcactgtaatataatatgg

SEQ ID NO: 68899 - DNA, 22 bp, Artificial Sequence
  chemically synthesized
taatataatatggtacaccggc

SEQ ID NO: 68900 - DNA, 22 bp, Artificial Sequence
  chemically synthesized
agtgaaatacagattatatggt

SEQ ID NO: 68901 - DNA, 22 bp, Artificial Sequence
  chemically synthesized
tatggtgaaattgtaatgcatc

SEQ ID NO: 68902 - DNA, 22 bp, Artificial Sequence
  chemically synthesized
taatgcatcatttgctattagt

SEQ ID NO: 68903 - DNA, 22 bp, Artificial Sequence
  chemically synthesized
gctattagtggactggtaataa

SEQ ID NO: 68904 - DNA, 22 bp, Artificial Sequence
  chemically synthesized
ctattagtggactggtaataat

SEQ ID NO: 68905 - DNA, 22 bp, Artificial Sequence
  chemically synthesized
ttagtggactggtaataattac

SEQ ID NO: 68906 - DNA, 22 bp, Artificial Sequence
  chemically synthesized
gtggactggtaataattaccag

SEQ ID NO: 68907 - DNA, 22 bp, Artificial Sequence
  chemically synthesized
gtaataattaccagtttcaaag

SEQ ID NO: 68908 - DNA, 22 bp, Artificial Sequence
  chemically synthesized
ccagtttcaaagcagctctctc

SEQ ID NO: 68909 - DNA, 22 bp, Artificial Sequence
  chemically synthesized
caaagcagctctctccatgtaa

SEQ ID NO: 68910 - DNA, 22 bp, Artificial Sequence
  chemically synthesized
aaagcagctctctccatgtaat

SEQ ID NO: 68911 - DNA, 22 bp, Artificial Sequence
  chemically synthesized
tctccatgtaatctttagtctc

SEQ ID NO: 68912 - DNA, 22 bp, Artificial Sequence
  chemically synthesized
tccatgtaatctttagtctcaa

SEQ ID NO: 68913 - DNA, 22 bp, Artificial Sequence
  chemically synthesized
catgtaatctttagtctcaatc

SEQ ID NO: 68914 - DNA, 22 bp, Artificial Sequence
  chemically synthesized
tagtctcaatcgtaacagccct

SEQ ID NO: 68915 - DNA, 22 bp, Artificial Sequence
  chemically synthesized
agtctcaatcgtaacagccctt

SEQ ID NO: 68916 - DNA, 22 bp, Artificial Sequence
  chemically synthesized
gtctcaatcgtaacagcccttc

SEQ ID NO: 68917 - DNA, 22 bp, Artificial Sequence
  chemically synthesized
aatcgtaacagcccttctcatt

SEQ ID NO: 68918 - DNA, 22 bp, Artificial Sequence
  chemically synthesized
ctcattgacattatgattacac

SEQ ID NO: 68919 - DNA, 22 bp, Artificial Sequence
  chemically synthesized
tcattgacattatgattacact

SEQ ID NO: 68920 - DNA, 22 bp, Artificial Sequence
  chemically synthesized
attgacattatgattacactag

SEQ ID NO: 68921 - DNA, 22 bp, Artificial Sequence
  chemically synthesized
acattatgattacactagctgc

SEQ ID NO: 68922 - DNA, 22 bp, Artificial Sequence
  chemically synthesized
tgattacactagctgccctcat

SEQ ID NO: 68923 - DNA, 22 bp, Artificial Sequence
  chemically synthesized
cactagctgccctcatgatcta

SEQ ID NO: 68924 - DNA, 22 bp, Artificial Sequence
  chemically synthesized
gctgccctcatgatctagaata

SEQ ID NO: 68925 - DNA, 22 bp, Artificial Sequence
  chemically synthesized
ccctcatgatctagaatatcta

SEQ ID NO: 68926 - DNA, 22 bp, Artificial Sequence
  chemically synthesized
atgatctagaatatctagttga

SEQ ID NO: 68927 - DNA, 22 bp, Artificial Sequence
  chemically synthesized
gaatatctagttgatgggaata

SEQ ID NO: 68928 - DNA, 22 bp, Artificial Sequence
  chemically synthesized
gttgatgggaatactaaaatgc

SEQ ID NO: 68929 - DNA, 22 bp, Artificial Sequence
  chemically synthesized
atgggaatactaaaatgcgata

SEQ ID NO: 68930 - DNA, 22 bp, Artificial Sequence
  chemically synthesized
aaatgcgatagtgaaaactgta

SEQ ID NO: 68931 - DNA, 22 bp, Artificial Sequence
  chemically synthesized
tatgttgtatgctcattataag

SEQ ID NO: 68932 - DNA, 22 bp, Artificial Sequence
  chemically synthesized
tatgctcattataagataaaat

SEQ ID NO: 68933 - DNA, 22 bp, Artificial Sequence
  chemically synthesized
attataagataaaatgccattt

SEQ ID NO: 68934 - DNA, 22 bp, Artificial Sequence
  chemically synthesized
taagataaaatgccattttctc

SEQ ID NO: 68935 - DNA, 22 bp, Artificial Sequence
  chemically synthesized
tctctgacctgatgtatgagag

SEQ ID NO: 68936 - DNA, 22 bp, Artificial Sequence
  chemically synthesized
ctctgacctgatgtatgagaga

SEQ ID NO: 68937 - DNA, 22 bp, Artificial Sequence
  chemically synthesized
tctgacctgatgtatgagagag

SEQ ID NO: 68938 - DNA, 22 bp, Artificial Sequence
  chemically synthesized
tgacctgatgtatgagagagag

SEQ ID NO: 68939 - DNA, 22 bp, Artificial Sequence
  chemically synthesized
acctgatgtatgagagagaggg

SEQ ID NO: 68940 - DNA, 22 bp, Artificial Sequence
  chemically synthesized
atgtatgagagagaggggagga

SEQ ID NO: 68941 - DNA, 22 bp, Artificial Sequence
  chemically synthesized
acatactgtagcatgatcacat

SEQ ID NO: 68942 - DNA, 22 bp, Artificial Sequence
  chemically synthesized
tagcatgatcacataactggct

SEQ ID NO: 68943 - DNA, 22 bp, Artificial Sequence
  chemically synthesized
gctctgaaaaaaagtttaggat

SEQ ID NO: 68944 - DNA, 22 bp, Artificial Sequence
  chemically synthesized
tgaaaaaaagtttaggatgctc

SEQ ID NO: 68945 - DNA, 22 bp, Artificial Sequence
  chemically synthesized
aaaaaaagtttaggatgctcag

SEQ ID NO: 68946 - DNA, 22 bp, Artificial Sequence
  chemically synthesized
aggatgctcagggcagcaaaat

SEQ ID NO: 68947 - DNA, 22 bp, Artificial Sequence
  chemically synthesized
ggatgctcagggcagcaaaata

SEQ ID NO: 68948 - DNA, 22 bp, Artificial Sequence
  chemically synthesized
agggcagcaaaataaaatggac

SEQ ID NO: 68949 - DNA, 22 bp, Artificial Sequence
  chemically synthesized
ttctcatttaagcctttttgaa

SEQ ID NO: 68950 - DNA, 22 bp, Artificial Sequence
  chemically synthesized
tctcatttaagcctttttgaaa

SEQ ID NO: 68951 - DNA, 22 bp, Artificial Sequence
  chemically synthesized
ctcatttaagcctttttgaaag

SEQ ID NO: 68952 - DNA, 22 bp, Artificial Sequence
  chemically synthesized
tcatttaagcctttttgaaagg

SEQ ID NO: 68953 - DNA, 22 bp, Artificial Sequence
  chemically synthesized
atttaagcctttttgaaaggat

SEQ ID NO: 68954 - DNA, 22 bp, Artificial Sequence
  chemically synthesized
aagcctttttgaaaggatacaa

SEQ ID NO: 68955 - DNA, 22 bp, Artificial Sequence
  chemically synthesized
agcctttttgaaaggatacaaa

SEQ ID NO: 68956 - DNA, 22 bp, Artificial Sequence
  chemically synthesized
tttgaaaggatacaaatgagat

SEQ ID NO: 68957 - DNA, 22 bp, Artificial Sequence
  chemically synthesized
ttgaaaggatacaaatgagatc

SEQ ID NO: 68958 - DNA, 22 bp, Artificial Sequence
  chemically synthesized
tgaaaggatacaaatgagatcc

SEQ ID NO: 68959 - DNA, 22 bp, Artificial Sequence
  chemically synthesized
gaaaggatacaaatgagatcct

SEQ ID NO: 68960 - DNA, 22 bp, Artificial Sequence
  chemically synthesized
aaaggatacaaatgagatcctt

SEQ ID NO: 68961 - DNA, 22 bp, Artificial Sequence
  chemically synthesized
gatgtagtgctgtatgccacag

SEQ ID NO: 68962 - DNA, 22 bp, Artificial Sequence
  chemically synthesized
atgtagtgctgtatgccacaga

SEQ ID NO: 68963 - DNA, 22 bp, Artificial Sequence
  chemically synthesized
tatgccacagattttggcattt

SEQ ID NO: 68964 - DNA, 22 bp, Artificial Sequence
  chemically synthesized
tggcatttatcaatgactacaa

SEQ ID NO: 68965 - DNA, 22 bp, Artificial Sequence
  chemically synthesized
ggcatttatcaatgactacaat

SEQ ID NO: 68966 - DNA, 22 bp, Artificial Sequence
  chemically synthesized
gcatttatcaatgactacaatt

SEQ ID NO: 68967 - DNA, 22 bp, Artificial Sequence
  chemically synthesized
atcaatgactacaattcatggc

SEQ ID NO: 68968 - DNA, 22 bp, Artificial Sequence
  chemically synthesized
tcaatgactacaattcatggca

SEQ ID NO: 68969 - DNA, 22 bp, Artificial Sequence
  chemically synthesized
caattcatggcacatgtgaaac

SEQ ID NO: 68970 - DNA, 22 bp, Artificial Sequence
  chemically synthesized
atggcacatgtgaaaccagcac

SEQ ID NO: 68971 - DNA, 22 bp, Artificial Sequence
  chemically synthesized
attatgagtctagtcctggatt

SEQ ID NO: 68972 - DNA, 22 bp, Artificial Sequence
  chemically synthesized
tgagtctagtcctggatttcaa

SEQ ID NO: 68973 - DNA, 22 bp, Artificial Sequence
  chemically synthesized
gtcctggatttcaatcgatgtt

SEQ ID NO: 68974 - DNA, 22 bp, Artificial Sequence
  chemically synthesized
gatttcaatcgatgttttataa

SEQ ID NO: 68975 - DNA, 22 bp, Artificial Sequence
  chemically synthesized
caatcgatgttttataaggtaa

SEQ ID NO: 68976 - DNA, 22 bp, Artificial Sequence
  chemically synthesized
aatcgatgttttataaggtaaa

SEQ ID NO: 68977 - DNA, 22 bp, Artificial Sequence
  chemically synthesized
tataaggtaaaatataatttta

SEQ ID NO: 68978 - DNA, 22 bp, Artificial Sequence
  chemically synthesized
ataaggtaaaatataattttaa

SEQ ID NO: 68979 - DNA, 22 bp, Artificial Sequence
  chemically synthesized
taaggtaaaatataattttaag

SEQ ID NO: 68980 - DNA, 22 bp, Artificial Sequence
  chemically synthesized
taaggcatttggagtgatgaac

SEQ ID NO: 68981 - DNA, 22 bp, Artificial Sequence
  chemically synthesized
aaggcatttggagtgatgaacg

SEQ ID NO: 68982 - DNA, 22 bp, Artificial Sequence
  chemically synthesized
aggcatttggagtgatgaacgt

SEQ ID NO: 68983 - DNA, 22 bp, Artificial Sequence
  chemically synthesized
ggagtgatgaacgtgttaagga

SEQ ID NO: 68984 - DNA, 22 bp, Artificial Sequence
  chemically synthesized
gagtgatgaacgtgttaaggac

SEQ ID NO: 68985 - DNA, 22 bp, Artificial Sequence
  chemically synthesized
aggacttggattatcagacaaa

SEQ ID NO: 68986 - DNA, 22 bp, Artificial Sequence
  chemically synthesized
ggattatcagacaaatcttttt

SEQ ID NO: 68987 - DNA, 22 bp, Artificial Sequence
  chemically synthesized
gattatcagacaaatcttttta

SEQ ID NO: 68988 - DNA, 22 bp, Artificial Sequence
  chemically synthesized
tcagacaaatctttttacttgc

SEQ ID NO: 68989 - DNA, 22 bp, Artificial Sequence
  chemically synthesized
tttacttgcccaactcagatcg

SEQ ID NO: 68990 - DNA, 22 bp, Artificial Sequence
  chemically synthesized
ttacttgcccaactcagatcgt

SEQ ID NO: 68991 - DNA, 22 bp, Artificial Sequence
  chemically synthesized
tacttgcccaactcagatcgtc

SEQ ID NO: 68992 - DNA, 22 bp, Artificial Sequence
  chemically synthesized
acttgcccaactcagatcgtca

SEQ ID NO: 68993 - DNA, 22 bp, Artificial Sequence
  chemically synthesized
cttgcccaactcagatcgtcag

SEQ ID NO: 68994 - DNA, 22 bp, Artificial Sequence
  chemically synthesized
gcccaactcagatcgtcaggct

SEQ ID NO: 68995 - DNA, 22 bp, Artificial Sequence
  chemically synthesized
cccaactcagatcgtcaggcta

SEQ ID NO: 68996 - DNA, 22 bp, Artificial Sequence
  chemically synthesized
agatcgtcaggctaaataggaa

SEQ ID NO: 68997 - DNA, 22 bp, Artificial Sequence
  chemically synthesized
aataggaatgatagtcacccag

SEQ ID NO: 68998 - DNA, 22 bp, Artificial Sequence
  chemically synthesized
gggaggacaaggaggaagccac

SEQ ID NO: 68999 - DNA, 22 bp, Artificial Sequence
  chemically synthesized
gaaccagatagttttttttcca

SEQ ID NO: 69000 - DNA, 22 bp, Artificial Sequence
  chemically synthesized
tttttccagcctatttgggacc

SEQ ID NO: 69001 - DNA, 22 bp, Artificial Sequence
  chemically synthesized
ttttccagcctatttgggaccc

SEQ ID NO: 69002 - DNA, 22 bp, Artificial Sequence
  chemically synthesized
tttccagcctatttgggaccca

SEQ ID NO: 69003 - DNA, 22 bp, Artificial Sequence
  chemically synthesized
ttccagcctatttgggacccaa

SEQ ID NO: 69004 - DNA, 22 bp, Artificial Sequence
  chemically synthesized
tccagcctatttgggacccaag

SEQ ID NO: 69005 - DNA, 22 bp, Artificial Sequence
  chemically synthesized
ccagcctatttgggacccaagt

SEQ ID NO: 69006 - DNA, 22 bp, Artificial Sequence
  chemically synthesized
cagcctatttgggacccaagtt

SEQ ID NO: 69007 - DNA, 22 bp, Artificial Sequence
  chemically synthesized
tttgggacccaagttattgttc

SEQ ID NO: 69008 - DNA, 22 bp, Artificial Sequence
  chemically synthesized
gggacccaagttattgttcaac

SEQ ID NO: 69009 - DNA, 22 bp, Artificial Sequence
  chemically synthesized
ggacccaagttattgttcaaca

SEQ ID NO: 69010 - DNA, 22 bp, Artificial Sequence
  chemically synthesized
ttgttcaacaacaacaaaaaat

SEQ ID NO: 69011 - DNA, 22 bp, Artificial Sequence
  chemically synthesized
ttcaacaacaacaaaaaattta

SEQ ID NO: 69012 - DNA, 22 bp, Artificial Sequence
  chemically synthesized
aacaacaacaaaaaatttataa

SEQ ID NO: 69013 - DNA, 22 bp, Artificial Sequence
  chemically synthesized
ataaaaatgttctcaatgaagc

SEQ ID NO: 69014 - DNA, 22 bp, Artificial Sequence
  chemically synthesized
taaaaatgttctcaatgaagct

SEQ ID NO: 69015 - DNA, 22 bp, Artificial Sequence
  chemically synthesized
tcaatgaagctttttatttccc

SEQ ID NO: 69016 - DNA, 22 bp, Artificial Sequence
  chemically synthesized
aatgaagctttttatttccctt

SEQ ID NO: 69017 - DNA, 22 bp, Artificial Sequence
  chemically synthesized
tttatttccctttgaagagagg

SEQ ID NO: 69018 - DNA, 22 bp, Artificial Sequence
  chemically synthesized
ttatttccctttgaagagagga

SEQ ID NO: 69019 - DNA, 22 bp, Artificial Sequence
  chemically synthesized
tatttccctttgaagagaggag

SEQ ID NO: 69020 - DNA, 22 bp, Artificial Sequence
  chemically synthesized
atttccctttgaagagaggagg

SEQ ID NO: 69021 - DNA, 22 bp, Artificial Sequence
  chemically synthesized
tttccctttgaagagaggaggc

SEQ ID NO: 69022 - DNA, 22 bp, Artificial Sequence
  chemically synthesized
ccctttgaagagaggaggcaaa

SEQ ID NO: 69023 - DNA, 22 bp, Artificial Sequence
  chemically synthesized
cctttgaagagaggaggcaaac

SEQ ID NO: 69024 - DNA, 22 bp, Artificial Sequence
  chemically synthesized
tgaagagaggaggcaaacaaaa

SEQ ID NO: 69025 - DNA, 22 bp, Artificial Sequence
  chemically synthesized
gaagagaggaggcaaacaaaaa

SEQ ID NO: 69026 - DNA, 22 bp, Artificial Sequence
  chemically synthesized
aagagaggaggcaaacaaaaat

SEQ ID NO: 69027 - DNA, 22 bp, Artificial Sequence
  chemically synthesized
atgtcagcgttttctttcaaaa

SEQ ID NO: 69028 - DNA, 22 bp, Artificial Sequence
  chemically synthesized
tctttcaaaatctttctgcctt

SEQ ID NO: 69029 - DNA, 22 bp, Artificial Sequence
  chemically synthesized
ctttcaaaatctttctgccttt

SEQ ID NO: 69030 - DNA, 22 bp, Artificial Sequence
  chemically synthesized
tttcaaaatctttctgcctttt

SEQ ID NO: 69031 - DNA, 22 bp, Artificial Sequence
  chemically synthesized
tcaaaatctttctgcctttttt

SEQ ID NO: 69032 - DNA, 22 bp, Artificial Sequence
  chemically synthesized
caaaatctttctgccttttttc

SEQ ID NO: 69033 - DNA, 22 bp, Artificial Sequence
  chemically synthesized
aaaatctttctgccttttttcc

SEQ ID NO: 69034 - DNA, 22 bp, Artificial Sequence
  chemically synthesized
tctgccttttttcccccttcca

SEQ ID NO: 69035 - DNA, 22 bp, Artificial Sequence
  chemically synthesized
ctgccttttttcccccttccac

SEQ ID NO: 69036 - DNA, 22 bp, Artificial Sequence
  chemically synthesized
tgccttttttcccccttccaca

SEQ ID NO: 69037 - DNA, 22 bp, Artificial Sequence
  chemically synthesized
ccttttttcccccttccacatt

SEQ ID NO: 69038 - DNA, 22 bp, Artificial Sequence
  chemically synthesized
ttttcccccttccacattagac

SEQ ID NO: 69039 - DNA, 22 bp, Artificial Sequence
  chemically synthesized
tttcccccttccacattagaca

SEQ ID NO: 69040 - DNA, 22 bp, Artificial Sequence
  chemically synthesized
ttcccccttccacattagacaa

SEQ ID NO: 69041 - DNA, 22 bp, Artificial Sequence
  chemically synthesized
tcccccttccacattagacaaa

SEQ ID NO: 69042 - DNA, 22 bp, Artificial Sequence
  chemically synthesized
cccccttccacattagacaaat

SEQ ID NO: 69043 - DNA, 22 bp, Artificial Sequence
  chemically synthesized
ccccttccacattagacaaatg

SEQ ID NO: 69044 - DNA, 22 bp, Artificial Sequence
  chemically synthesized
ccacattagacaaatgtttgaa

SEQ ID NO: 69045 - DNA, 22 bp, Artificial Sequence
  chemically synthesized
cacattagacaaatgtttgaaa

SEQ ID NO: 69046 - DNA, 22 bp, Artificial Sequence
  chemically synthesized
gacaaatgtttgaaacctaatt

SEQ ID NO: 69047 - DNA, 22 bp, Artificial Sequence
  chemically synthesized
gaaacctaattttggtatctta

SEQ ID NO: 69048 - DNA, 22 bp, Artificial Sequence
  chemically synthesized
aaacctaattttggtatcttac

SEQ ID NO: 69049 - DNA, 22 bp, Artificial Sequence
  chemically synthesized
attttggtatcttaccatctaa

SEQ ID NO: 69050 - DNA, 22 bp, Artificial Sequence
  chemically synthesized
tggtatcttaccatctaatctt

SEQ ID NO: 69051 - DNA, 22 bp, Artificial Sequence
  chemically synthesized
ggtatcttaccatctaatcttg

SEQ ID NO: 69052 - DNA, 22 bp, Artificial Sequence
  chemically synthesized
gtatcttaccatctaatcttgt

SEQ ID NO: 69053 - DNA, 22 bp, Artificial Sequence
  chemically synthesized
accatctaatcttgtttaagag

SEQ ID NO: 69054 - DNA, 22 bp, Artificial Sequence
  chemically synthesized
ccatctaatcttgtttaagaga

SEQ ID NO: 69055 - DNA, 22 bp, Artificial Sequence
  chemically synthesized
atcttgtttaagagatttaccc

SEQ ID NO: 69056 - DNA, 22 bp, Artificial Sequence
  chemically synthesized
gtttaagagatttacccaggag

SEQ ID NO: 69057 - DNA, 22 bp, Artificial Sequence
  chemically synthesized
tttaagagatttacccaggagt

SEQ ID NO: 69058 - DNA, 22 bp, Artificial Sequence
  chemically synthesized
aagagatttacccaggagtgag

SEQ ID NO: 69059 - DNA, 22 bp, Artificial Sequence
  chemically synthesized
agagatttacccaggagtgaga

SEQ ID NO: 69060 - DNA, 22 bp, Artificial Sequence
  chemically synthesized
acccaggagtgagatatattga

SEQ ID NO: 69061 - DNA, 22 bp, Artificial Sequence
  chemically synthesized
cccaggagtgagatatattgag

SEQ ID NO: 69062 - DNA, 22 bp, Artificial Sequence
  chemically synthesized
agtgggattataaatgcgttgt

SEQ ID NO: 69063 - DNA, 22 bp, Artificial Sequence
  chemically synthesized
taaatgcgttgtaaagtaaatt

SEQ ID NO: 69064 - DNA, 22 bp, Artificial Sequence
  chemically synthesized
taaagtaaattacaaggtcagg

SEQ ID NO: 69065 - DNA, 22 bp, Artificial Sequence
  chemically synthesized
caaggtcagggcaggagtccat

SEQ ID NO: 69066 - DNA, 22 bp, Artificial Sequence
  chemically synthesized
tttagacaagtgcttgagcgag

SEQ ID NO: 69067 - DNA, 22 bp, Artificial Sequence
  chemically synthesized
agacaagtgcttgagcgaggct

SEQ ID NO: 69068 - DNA, 22 bp, Artificial Sequence
  chemically synthesized
gacaagtgcttgagcgaggctg

SEQ ID NO: 69069 - DNA, 22 bp, Artificial Sequence
  chemically synthesized
gagcgaggctggcttattttgg

SEQ ID NO: 69070 - DNA, 22 bp, Artificial Sequence
  chemically synthesized
agcgaggctggcttattttgga

SEQ ID NO: 69071 - DNA, 22 bp, Artificial Sequence
  chemically synthesized
gcttattttggaataccagtgt

SEQ ID NO: 69072 - DNA, 22 bp, Artificial Sequence
  chemically synthesized
attttggaataccagtgtttgg

SEQ ID NO: 69073 - DNA, 22 bp, Artificial Sequence
  chemically synthesized
ttttggaataccagtgtttggg

SEQ ID NO: 69074 - DNA, 22 bp, Artificial Sequence
  chemically synthesized
tggaataccagtgtttgggggc

SEQ ID NO: 69075 - DNA, 22 bp, Artificial Sequence
  chemically synthesized
ggaataccagtgtttgggggct

SEQ ID NO: 69076 - DNA, 22 bp, Artificial Sequence
  chemically synthesized
gaataccagtgtttgggggctc

SEQ ID NO: 69077 - DNA, 22 bp, Artificial Sequence
  chemically synthesized
gggggctcctgagaagaccctg

SEQ ID NO: 69078 - DNA, 22 bp, Artificial Sequence
  chemically synthesized
ggggctcctgagaagaccctgc

SEQ ID NO: 69079 - DNA, 22 bp, Artificial Sequence
  chemically synthesized
ctgagaagaccctgccggcttt

SEQ ID NO: 69080 - DNA, 22 bp, Artificial Sequence
  chemically synthesized
agaagaccctgccggcttttct

SEQ ID NO: 69081 - DNA, 22 bp, Artificial Sequence
  chemically synthesized
ccggcttttctttctgacttgc

SEQ ID NO: 69082 - DNA, 22 bp, Artificial Sequence
  chemically synthesized
ttctttctgacttgctaaatgg

SEQ ID NO: 69083 - DNA, 22 bp, Artificial Sequence
  chemically synthesized
tctttctgacttgctaaatgga

SEQ ID NO: 69084 - DNA, 22 bp, Artificial Sequence
  chemically synthesized
ctttctgacttgctaaatggag

SEQ ID NO: 69085 - DNA, 22 bp, Artificial Sequence
  chemically synthesized
tttctgacttgctaaatggagg

SEQ ID NO: 69086 - DNA, 22 bp, Artificial Sequence
  chemically synthesized
tctgacttgctaaatggaggca

SEQ ID NO: 69087 - DNA, 22 bp, Artificial Sequence
  chemically synthesized
ctgacttgctaaatggaggcat

SEQ ID NO: 69088 - DNA, 22 bp, Artificial Sequence
  chemically synthesized
tgacttgctaaatggaggcatc

SEQ ID NO: 69089 - DNA, 22 bp, Artificial Sequence
  chemically synthesized
acttgctaaatggaggcatcat

SEQ ID NO: 69090 - DNA, 22 bp, Artificial Sequence
  chemically synthesized
gctaaatggaggcatcatataa

SEQ ID NO: 69091 - DNA, 22 bp, Artificial Sequence
  chemically synthesized
ctaaatggaggcatcatataat

SEQ ID NO: 69092 - DNA, 22 bp, Artificial Sequence
  chemically synthesized
aatggaggcatcatataattga

SEQ ID NO: 69093 - DNA, 22 bp, Artificial Sequence
  chemically synthesized
attaattcctcattctcactct

SEQ ID NO: 69094 - DNA, 22 bp, Artificial Sequence
  chemically synthesized
attcctcattctcactcttaac

SEQ ID NO: 69095 - DNA, 22 bp, Artificial Sequence
  chemically synthesized
ctcattctcactcttaacctcc

SEQ ID NO: 69096 - DNA, 22 bp, Artificial Sequence
  chemically synthesized
attctcactcttaacctccctg

SEQ ID NO: 69097 - DNA, 22 bp, Artificial Sequence
  chemically synthesized
tcactcttaacctccctggtag

SEQ ID NO: 69098 - DNA, 22 bp, Artificial Sequence
  chemically synthesized
actcttaacctccctggtagat

SEQ ID NO: 69099 - DNA, 22 bp, Artificial Sequence
  chemically synthesized
ttaacctccctggtagattttt

SEQ ID NO: 69100 - DNA, 22 bp, Artificial Sequence
  chemically synthesized
aacctccctggtagattttttt

SEQ ID NO: 69101 - DNA, 22 bp, Artificial Sequence
  chemically synthesized
acctccctggtagatttttttt

SEQ ID NO: 69102 - DNA, 22 bp, Artificial Sequence
  chemically synthesized
cctggtagattttttttttttt

SEQ ID NO: 69103 - DNA, 22 bp, Artificial Sequence
  chemically synthesized
gtagattttttttttttttcct

SEQ ID NO: 69104 - DNA, 22 bp, Artificial Sequence
  chemically synthesized
tttttttttttccttcttagaa

SEQ ID NO: 69105 - DNA, 22 bp, Artificial Sequence
  chemically synthesized
ttttttttttccttcttagaaa

SEQ ID NO: 69106 - DNA, 22 bp, Artificial Sequence
  chemically synthesized
tttttttttccttcttagaaag

SEQ ID NO: 69107 - DNA, 22 bp, Artificial Sequence
  chemically synthesized
ttttttttccttcttagaaagt

SEQ ID NO: 69108 - DNA, 22 bp, Artificial Sequence
  chemically synthesized
tttttttccttcttagaaagtt

SEQ ID NO: 69109 - DNA, 22 bp, Artificial Sequence
  chemically synthesized
ttttttccttcttagaaagtta

SEQ ID NO: 69110 - DNA, 22 bp, Artificial Sequence
  chemically synthesized
tttttccttcttagaaagttac

SEQ ID NO: 69111 - DNA, 22 bp, Artificial Sequence
  chemically synthesized
ttttccttcttagaaagttact

SEQ ID NO: 69112 - DNA, 22 bp, Artificial Sequence
  chemically synthesized
tttccttcttagaaagttactg

SEQ ID NO: 69113 - DNA, 22 bp, Artificial Sequence
  chemically synthesized
ttccttcttagaaagttactga

SEQ ID NO: 69114 - DNA, 22 bp, Artificial Sequence
  chemically synthesized
tccttcttagaaagttactgac

SEQ ID NO: 69115 - DNA, 22 bp, Artificial Sequence
  chemically synthesized
ccttcttagaaagttactgaca

SEQ ID NO: 69116 - DNA, 22 bp, Artificial Sequence
  chemically synthesized
cttcttagaaagttactgacaa

SEQ ID NO: 69117 - DNA, 22 bp, Artificial Sequence
  chemically synthesized
cttagaaagttactgacaaata

SEQ ID NO: 69118 - DNA, 22 bp, Artificial Sequence
  chemically synthesized
ttagaaagttactgacaaatac

SEQ ID NO: 69119 - DNA, 22 bp, Artificial Sequence
  chemically synthesized
agaaagttactgacaaatacta

SEQ ID NO: 69120 - DNA, 22 bp, Artificial Sequence
  chemically synthesized
gaaagttactgacaaatactag

SEQ ID NO: 69121 - DNA, 22 bp, Artificial Sequence
  chemically synthesized
ctgacaaatactagctgtggcc

SEQ ID NO: 69122 - DNA, 22 bp, Artificial Sequence
  chemically synthesized
acaaatactagctgtggcctta

SEQ ID NO: 69123 - DNA, 22 bp, Artificial Sequence
  chemically synthesized
gctgtggccttaaagaactctt

SEQ ID NO: 69124 - DNA, 22 bp, Artificial Sequence
  chemically synthesized
tggccttaaagaactcttgcag

SEQ ID NO: 69125 - DNA, 22 bp, Artificial Sequence
  chemically synthesized
aaagaactcttgcagcccttct

SEQ ID NO: 69126 - DNA, 22 bp, Artificial Sequence
  chemically synthesized
aagaactcttgcagcccttctt

SEQ ID NO: 69127 - DNA, 22 bp, Artificial Sequence
  chemically synthesized
ttgcagcccttcttttaaaaga

SEQ ID NO: 69128 - DNA, 22 bp, Artificial Sequence
  chemically synthesized
gcagcccttcttttaaaagaag

SEQ ID NO: 69129 - DNA, 22 bp, Artificial Sequence
  chemically synthesized
cagcccttcttttaaaagaagg

SEQ ID NO: 69130 - DNA, 22 bp, Artificial Sequence
  chemically synthesized
cttttaaaagaaggagaaaagt

SEQ ID NO: 69131 - DNA, 22 bp, Artificial Sequence
  chemically synthesized
ttttaaaagaaggagaaaagtt

SEQ ID NO: 69132 - DNA, 22 bp, Artificial Sequence
  chemically synthesized
ttaaaagaaggagaaaagtttg

SEQ ID NO: 69133 - DNA, 22 bp, Artificial Sequence
  chemically synthesized
taaaagaaggagaaaagtttgt

SEQ ID NO: 69134 - DNA, 22 bp, Artificial Sequence
  chemically synthesized
aaaagaaggagaaaagtttgtt

SEQ ID NO: 69135 - DNA, 22 bp, Artificial Sequence
  chemically synthesized
aaagaaggagaaaagtttgtta

SEQ ID NO: 69136 - DNA, 22 bp, Artificial Sequence
  chemically synthesized
gttatttctcagttatatttta

SEQ ID NO: 69137 - DNA, 22 bp, Artificial Sequence
  chemically synthesized
ttatttctcagttatattttaa

SEQ ID NO: 69138 - DNA, 22 bp, Artificial Sequence
  chemically synthesized
tttctcagttatattttaaggc

SEQ ID NO: 69139 - DNA, 22 bp, Artificial Sequence
  chemically synthesized
ctcagttatattttaaggcttt

SEQ ID NO: 69140 - DNA, 22 bp, Artificial Sequence
  chemically synthesized
tcagttatattttaaggctttt

SEQ ID NO: 69141 - DNA, 22 bp, Artificial Sequence
  chemically synthesized
agttatattttaaggctttttt

SEQ ID NO: 69142 - DNA, 22 bp, Artificial Sequence
  chemically synthesized
tattttaaggctttttttttca

SEQ ID NO: 69143 - DNA, 22 bp, Artificial Sequence
  chemically synthesized
taaggctttttttttcagaatc

SEQ ID NO: 69144 - DNA, 22 bp, Artificial Sequence
  chemically synthesized
aaggctttttttttcagaatct

SEQ ID NO: 69145 - DNA, 22 bp, Artificial Sequence
  chemically synthesized
aggctttttttttcagaatctc

SEQ ID NO: 69146 - DNA, 22 bp, Artificial Sequence
  chemically synthesized
tttttttcagaatctctgggaa

SEQ ID NO: 69147 - DNA, 22 bp, Artificial Sequence
  chemically synthesized
ttttttcagaatctctgggaag

SEQ ID NO: 69148 - DNA, 22 bp, Artificial Sequence
  chemically synthesized
tttttcagaatctctgggaagt

SEQ ID NO: 69149 - DNA, 22 bp, Artificial Sequence
  chemically synthesized
ttttcagaatctctgggaagtt

SEQ ID NO: 69150 - DNA, 22 bp, Artificial Sequence
  chemically synthesized
tttcagaatctctgggaagttt

SEQ ID NO: 69151 - DNA, 22 bp, Artificial Sequence
  chemically synthesized
ttcagaatctctgggaagtttt

SEQ ID NO: 69152 - DNA, 22 bp, Artificial Sequence
  chemically synthesized
tcagaatctctgggaagttttg

SEQ ID NO: 69153 - DNA, 22 bp, Artificial Sequence
  chemically synthesized
cagaatctctgggaagttttgt

SEQ ID NO: 69154 - DNA, 22 bp, Artificial Sequence
  chemically synthesized
agaatctctgggaagttttgtt

SEQ ID NO: 69155 - DNA, 22 bp, Artificial Sequence
  chemically synthesized
tgggaagttttgtttttctcat

SEQ ID NO: 69156 - DNA, 22 bp, Artificial Sequence
  chemically synthesized
ggaagttttgtttttctcatcc

SEQ ID NO: 69157 - DNA, 22 bp, Artificial Sequence
  chemically synthesized
tgtttttctcatcctcgtcctt

SEQ ID NO: 69158 - DNA, 22 bp, Artificial Sequence
  chemically synthesized
gtttttctcatcctcgtccttt

SEQ ID NO: 69159 - DNA, 22 bp, Artificial Sequence
  chemically synthesized
tttttctcatcctcgtcctttg

SEQ ID NO: 69160 - DNA, 22 bp, Artificial Sequence
  chemically synthesized
ttctcatcctcgtcctttggct

SEQ ID NO: 69161 - DNA, 22 bp, Artificial Sequence
  chemically synthesized
tctcatcctcgtcctttggcta

SEQ ID NO: 69162 - DNA, 22 bp, Artificial Sequence
  chemically synthesized
ctcatcctcgtcctttggctac

SEQ ID NO: 69163 - DNA, 22 bp, Artificial Sequence
  chemically synthesized
tcatcctcgtcctttggctacc

SEQ ID NO: 69164 - DNA, 22 bp, Artificial Sequence
  chemically synthesized
atcctcgtcctttggctaccat

SEQ ID NO: 69165 - DNA, 22 bp, Artificial Sequence
  chemically synthesized
gtcctttggctaccattacttc

SEQ ID NO: 69166 - DNA, 22 bp, Artificial Sequence
  chemically synthesized
tggctaccattacttctgccct

SEQ ID NO: 69167 - DNA, 22 bp, Artificial Sequence
  chemically synthesized
ggctaccattacttctgccctt

SEQ ID NO: 69168 - DNA, 22 bp, Artificial Sequence
  chemically synthesized
gctaccattacttctgcccttt

SEQ ID NO: 69169 - DNA, 22 bp, Artificial Sequence
  chemically synthesized
ccattacttctgccctttttaa

SEQ ID NO: 69170 - DNA, 22 bp, Artificial Sequence
  chemically synthesized
cttctgccctttttaatgttgc

SEQ ID NO: 69171 - DNA, 22 bp, Artificial Sequence
  chemically synthesized
ctgccctttttaatgttgcagt

SEQ ID NO: 69172 - DNA, 22 bp, Artificial Sequence
  chemically synthesized
tgccctttttaatgttgcagtt

SEQ ID NO: 69173 - DNA, 22 bp, Artificial Sequence
  chemically synthesized
ccctttttaatgttgcagttga

SEQ ID NO: 69174 - DNA, 22 bp, Artificial Sequence
  chemically synthesized
tttaatgttgcagttgactagt

SEQ ID NO: 69175 - DNA, 22 bp, Artificial Sequence
  chemically synthesized
ttaatgttgcagttgactagta

SEQ ID NO: 69176 - DNA, 22 bp, Artificial Sequence
  chemically synthesized
taatgttgcagttgactagtaa

SEQ ID NO: 69177 - DNA, 22 bp, Artificial Sequence
  chemically synthesized
aatgttgcagttgactagtaaa

SEQ ID NO: 69178 - DNA, 22 bp, Artificial Sequence
  chemically synthesized
atgttgcagttgactagtaaac

SEQ ID NO: 69179 - DNA, 22 bp, Artificial Sequence
  chemically synthesized
cagttgactagtaaactgttgg

SEQ ID NO: 69180 - DNA, 22 bp, Artificial Sequence
  chemically synthesized
actagtaaactgttggtcagtt

SEQ ID NO: 69181 - DNA, 22 bp, Artificial Sequence
  chemically synthesized
gtaaactgttggtcagttattc

SEQ ID NO: 69182 - DNA, 22 bp, Artificial Sequence
  chemically synthesized
ttggtcagttattccatatata

SEQ ID NO: 69183 - DNA, 22 bp, Artificial Sequence
  chemically synthesized
gtcagttattccatatatatat

SEQ ID NO: 69184 - DNA, 22 bp, Artificial Sequence
  chemically synthesized
ttccatatatatatatatttaa

SEQ ID NO: 69185 - DNA, 22 bp, Artificial Sequence
  chemically synthesized
catatatatatatatttaatgt

SEQ ID NO: 69186 - DNA, 22 bp, Artificial Sequence
  chemically synthesized
aatgtagctatctccccatata

SEQ ID NO: 69187 - DNA, 22 bp, Artificial Sequence
  chemically synthesized
atgtagctatctccccatatat

SEQ ID NO: 69188 - DNA, 22 bp, Artificial Sequence
  chemically synthesized
tctccccatatatatttaattt

SEQ ID NO: 69189 - DNA, 22 bp, Artificial Sequence
  chemically synthesized
cccatatatatttaatttagcc

SEQ ID NO: 69190 - DNA, 22 bp, Artificial Sequence
  chemically synthesized
aatttagccatctccccaaatg

SEQ ID NO: 69191 - DNA, 22 bp, Artificial Sequence
  chemically synthesized
atttagccatctccccaaatga

SEQ ID NO: 69192 - DNA, 22 bp, Artificial Sequence
  chemically synthesized
agccatctccccaaatgaaata

SEQ ID NO: 69193 - DNA, 22 bp, Artificial Sequence
  chemically synthesized
gccatctccccaaatgaaatat

SEQ ID NO: 69194 - DNA, 22 bp, Artificial Sequence
  chemically synthesized
cccaaatgaaatattttgtgaa

SEQ ID NO: 69195 - DNA, 22 bp, Artificial Sequence
  chemically synthesized
tgtgaagtcaagctggcccttc

SEQ ID NO: 69196 - DNA, 22 bp, Artificial Sequence
  chemically synthesized
gtgaagtcaagctggcccttct

SEQ ID NO: 69197 - DNA, 22 bp, Artificial Sequence
  chemically synthesized
tgaagtcaagctggcccttctt

SEQ ID NO: 69198 - DNA, 22 bp, Artificial Sequence
  chemically synthesized
gcccttctttgccaaagtggca

SEQ ID NO: 69199 - DNA, 22 bp, Artificial Sequence
  chemically synthesized
ctttgccaaagtggcatttacc

SEQ ID NO: 69200 - DNA, 22 bp, Artificial Sequence
  chemically synthesized
tttgccaaagtggcatttacca

SEQ ID NO: 69201 - DNA, 22 bp, Artificial Sequence
  chemically synthesized
tgccaaagtggcatttaccact

SEQ ID NO: 69202 - DNA, 22 bp, Artificial Sequence
  chemically synthesized
gccaaagtggcatttaccactc

SEQ ID NO: 69203 - DNA, 22 bp, Artificial Sequence
  chemically synthesized
ccaaagtggcatttaccactct

SEQ ID NO: 69204 - DNA, 22 bp, Artificial Sequence
  chemically synthesized
accactcttgggttcttttcag

SEQ ID NO: 69205 - DNA, 22 bp, Artificial Sequence
  chemically synthesized
ccactcttgggttcttttcagc

SEQ ID NO: 69206 - DNA, 22 bp, Artificial Sequence
  chemically synthesized
ttgggttcttttcagcaaggga

SEQ ID NO: 69207 - DNA, 22 bp, Artificial Sequence
  chemically synthesized
gggttcttttcagcaagggaaa

SEQ ID NO: 69208 - DNA, 22 bp, Artificial Sequence
  chemically synthesized
ggttcttttcagcaagggaaat

SEQ ID NO: 69209 - DNA, 22 bp, Artificial Sequence
  chemically synthesized
ttttcagcaagggaaataatgt

SEQ ID NO: 69210 - DNA, 22 bp, Artificial Sequence
  chemically synthesized
ttcagcaagggaaataatgtga

SEQ ID NO: 69211 - DNA, 22 bp, Artificial Sequence
  chemically synthesized
tcagcaagggaaataatgtgac

SEQ ID NO: 69212 - DNA, 22 bp, Artificial Sequence
  chemically synthesized
cagcaagggaaataatgtgact

SEQ ID NO: 69213 - DNA, 22 bp, Artificial Sequence
  chemically synthesized
agcaagggaaataatgtgactt

SEQ ID NO: 69214 - DNA, 22 bp, Artificial Sequence
  chemically synthesized
aagcagggcccctctccagacg

SEQ ID NO: 69215 - DNA, 22 bp, Artificial Sequence
  chemically synthesized
agcagggcccctctccagacgg

SEQ ID NO: 69216 - DNA, 22 bp, Artificial Sequence
  chemically synthesized
tccagacggcttggctactggc

SEQ ID NO: 69217 - DNA, 22 bp, Artificial Sequence
  chemically synthesized
cagacggcttggctactggcca

SEQ ID NO: 69218 - DNA, 22 bp, Artificial Sequence
  chemically synthesized
ggctactggccagagttgacta

SEQ ID NO: 69219 - DNA, 22 bp, Artificial Sequence
  chemically synthesized
gctactggccagagttgactag

SEQ ID NO: 69220 - DNA, 22 bp, Artificial Sequence
  chemically synthesized
ctggccagagttgactagctga

SEQ ID NO: 69221 - DNA, 22 bp, Artificial Sequence
  chemically synthesized
gccagagttgactagctgaact

SEQ ID NO: 69222 - DNA, 22 bp, Artificial Sequence
  chemically synthesized
actagctgaactgtatctttct

SEQ ID NO: 69223 - DNA, 22 bp, Artificial Sequence
  chemically synthesized
gctgaactgtatctttctgttt

SEQ ID NO: 69224 - DNA, 22 bp, Artificial Sequence
  chemically synthesized
aactgtatctttctgtttcttt

SEQ ID NO: 69225 - DNA, 22 bp, Artificial Sequence
  chemically synthesized
tatctttctgtttctttctcaa

SEQ ID NO: 69226 - DNA, 22 bp, Artificial Sequence
  chemically synthesized
tctgtttctttctcaactggag

SEQ ID NO: 69227 - DNA, 22 bp, Artificial Sequence
  chemically synthesized
ctgtttctttctcaactggagc

SEQ ID NO: 69228 - DNA, 22 bp, Artificial Sequence
  chemically synthesized
tgtttctttctcaactggagct

SEQ ID NO: 69229 - DNA, 22 bp, Artificial Sequence
  chemically synthesized
tttctttctcaactggagctga

SEQ ID NO: 69230 - DNA, 22 bp, Artificial Sequence
  chemically synthesized
ctttctcaactggagctgagtc

SEQ ID NO: 69231 - DNA, 22 bp, Artificial Sequence
  chemically synthesized
tttctcaactggagctgagtcc

SEQ ID NO: 69232 - DNA, 22 bp, Artificial Sequence
  chemically synthesized
tctcaactggagctgagtccca

SEQ ID NO: 69233 - DNA, 22 bp, Artificial Sequence
  chemically synthesized
ctcaactggagctgagtcccag

SEQ ID NO: 69234 - DNA, 22 bp, Artificial Sequence
  chemically synthesized
tcaactggagctgagtcccagc

SEQ ID NO: 69235 - DNA, 22 bp, Artificial Sequence
  chemically synthesized
aactggagctgagtcccagccg

SEQ ID NO: 69236 - DNA, 22 bp, Artificial Sequence
  chemically synthesized
gagctgagtcccagccgagggc

SEQ ID NO: 69237 - DNA, 22 bp, Artificial Sequence
  chemically synthesized
agtcccagccgagggcgcagga

SEQ ID NO: 69238 - DNA, 22 bp, Artificial Sequence
  chemically synthesized
tataatttggttcacgttgtta

SEQ ID NO: 69239 - DNA, 22 bp, Artificial Sequence
  chemically synthesized
ggttcacgttgttagcctctca

SEQ ID NO: 69240 - DNA, 22 bp, Artificial Sequence
  chemically synthesized
gttcacgttgttagcctctcaa

SEQ ID NO: 69241 - DNA, 22 bp, Artificial Sequence
  chemically synthesized
acgttgttagcctctcaaaaca

SEQ ID NO: 69242 - DNA, 22 bp, Artificial Sequence
  chemically synthesized
ttagcctctcaaaacaatgagg

SEQ ID NO: 69243 - DNA, 22 bp, Artificial Sequence
  chemically synthesized
gcctctcaaaacaatgaggagg

SEQ ID NO: 69244 - DNA, 22 bp, Artificial Sequence
  chemically synthesized
tcaaaacaatgaggaggaggat

SEQ ID NO: 69245 - DNA, 22 bp, Artificial Sequence
  chemically synthesized
aaaacaatgaggaggaggatag

SEQ ID NO: 69246 - DNA, 22 bp, Artificial Sequence
  chemically synthesized
ctcagcctgctgcctgtcatgg

SEQ ID NO: 69247 - DNA, 22 bp, Artificial Sequence
  chemically synthesized
tcagcctgctgcctgtcatggc

SEQ ID NO: 69248 - DNA, 22 bp, Artificial Sequence
  chemically synthesized
agcctgctgcctgtcatggcgc

SEQ ID NO: 69249 - DNA, 22 bp, Artificial Sequence
  chemically synthesized
ctgcctgtcatggcgctggctg

SEQ ID NO: 69250 - DNA, 22 bp, Artificial Sequence
  chemically synthesized
cctgtcatggcgctggctgttt

SEQ ID NO: 69251 - DNA, 22 bp, Artificial Sequence
  chemically synthesized
tcatggcgctggctgttttaac

SEQ ID NO: 69252 - DNA, 22 bp, Artificial Sequence
  chemically synthesized
gctgttttaactgttccttaaa

SEQ ID NO: 69253 - DNA, 22 bp, Artificial Sequence
  chemically synthesized
ttttaactgttccttaaactag

SEQ ID NO: 69254 - DNA, 22 bp, Artificial Sequence
  chemically synthesized
taactgttccttaaactaggat

SEQ ID NO: 69255 - DNA, 22 bp, Artificial Sequence
  chemically synthesized
aactgttccttaaactaggatg

SEQ ID NO: 69256 - DNA, 22 bp, Artificial Sequence
  chemically synthesized
actgttccttaaactaggatgc

SEQ ID NO: 69257 - DNA, 22 bp, Artificial Sequence
  chemically synthesized
ttccttaaactaggatgctgtg

SEQ ID NO: 69258 - DNA, 22 bp, Artificial Sequence
  chemically synthesized
cttaaactaggatgctgtgtct

SEQ ID NO: 69259 - DNA, 22 bp, Artificial Sequence
  chemically synthesized
aaactaggatgctgtgtctgct

SEQ ID NO: 69260 - DNA, 22 bp, Artificial Sequence
  chemically synthesized
aactaggatgctgtgtctgctt

SEQ ID NO: 69261 - DNA, 22 bp, Artificial Sequence
  chemically synthesized
ggatgctgtgtctgcttaagtc

SEQ ID NO: 69262 - DNA, 22 bp, Artificial Sequence
  chemically synthesized
tgtctgcttaagtcggcaccag

SEQ ID NO: 69263 - DNA, 22 bp, Artificial Sequence
  chemically synthesized
cttaagtcggcaccagccactc

SEQ ID NO: 69264 - DNA, 22 bp, Artificial Sequence
  chemically synthesized
aagtcggcaccagccactcctc

SEQ ID NO: 69265 - DNA, 22 bp, Artificial Sequence
  chemically synthesized
agtcggcaccagccactcctcc

SEQ ID NO: 69266 - DNA, 22 bp, Artificial Sequence
  chemically synthesized
ctcctaacttttccagacttgc

SEQ ID NO: 69267 - DNA, 22 bp, Artificial Sequence
  chemically synthesized
ctaacttttccagacttgcatt

SEQ ID NO: 69268 - DNA, 22 bp, Artificial Sequence
  chemically synthesized
acttttccagacttgcatttgt

SEQ ID NO: 69269 - DNA, 22 bp, Artificial Sequence
  chemically synthesized
ttccagacttgcatttgtctga

SEQ ID NO: 69270 - DNA, 22 bp, Artificial Sequence
  chemically synthesized
tccagacttgcatttgtctgac

SEQ ID NO: 69271 - DNA, 22 bp, Artificial Sequence
  chemically synthesized
ccagacttgcatttgtctgacc

SEQ ID NO: 69272 - DNA, 22 bp, Artificial Sequence
  chemically synthesized
cagacttgcatttgtctgaccg

SEQ ID NO: 69273 - DNA, 22 bp, Artificial Sequence
  chemically synthesized
gcatttgtctgaccgggggaca

SEQ ID NO: 69274 - DNA, 22 bp, Artificial Sequence
  chemically synthesized
catttgtctgaccgggggacaa

SEQ ID NO: 69275 - DNA, 22 bp, Artificial Sequence
  chemically synthesized
gtctgaccgggggacaactcct

SEQ ID NO: 69276 - DNA, 22 bp, Artificial Sequence
  chemically synthesized
tctgaccgggggacaactccta

SEQ ID NO: 69277 - DNA, 22 bp, Artificial Sequence
  chemically synthesized
accgggggacaactcctaaaga

SEQ ID NO: 69278 - DNA, 22 bp, Artificial Sequence
  chemically synthesized
ctaaagattggatacagcctat

SEQ ID NO: 69279 - DNA, 22 bp, Artificial Sequence
  chemically synthesized
aagattggatacagcctatccg

SEQ ID NO: 69280 - DNA, 22 bp, Artificial Sequence
  chemically synthesized
gatacagcctatccgttaaatc

SEQ ID NO: 69281 - DNA, 22 bp, Artificial Sequence
  chemically synthesized
tccgttaaatctgaatgaagtt

SEQ ID NO: 69282 - DNA, 22 bp, Artificial Sequence
  chemically synthesized
aatctgaatgaagtttttcttt

SEQ ID NO: 69283 - DNA, 22 bp, Artificial Sequence
  chemically synthesized
aatgaagtttttctttcagatt

SEQ ID NO: 69284 - DNA, 22 bp, Artificial Sequence
  chemically synthesized
ttctttcagattttttaaacat

SEQ ID NO: 69285 - DNA, 22 bp, Artificial Sequence
  chemically synthesized
tctttcagattttttaaacatt

SEQ ID NO: 69286 - DNA, 22 bp, Artificial Sequence
  chemically synthesized
ctttcagattttttaaacattc

SEQ ID NO: 69287 - DNA, 22 bp, Artificial Sequence
  chemically synthesized
tttcagattttttaaacattct

SEQ ID NO: 69288 - DNA, 22 bp, Artificial Sequence
  chemically synthesized
tcagattttttaaacattcttt

SEQ ID NO: 69289 - DNA, 22 bp, Artificial Sequence
  chemically synthesized
cagattttttaaacattctttg

SEQ ID NO: 69290 - DNA, 22 bp, Artificial Sequence
  chemically synthesized
agattttttaaacattctttga

SEQ ID NO: 69291 - DNA, 22 bp, Artificial Sequence
  chemically synthesized
tttaaacattctttgagataaa

SEQ ID NO: 69292 - DNA, 22 bp, Artificial Sequence
  chemically synthesized
ttaaacattctttgagataaaa

SEQ ID NO: 69293 - DNA, 22 bp, Artificial Sequence
  chemically synthesized
taaacattctttgagataaaaa

SEQ ID NO: 69294 - DNA, 22 bp, Artificial Sequence
  chemically synthesized
aaacattctttgagataaaaat

SEQ ID NO: 69295 - DNA, 22 bp, Artificial Sequence
  chemically synthesized
aacattctttgagataaaaatg

SEQ ID NO: 69296 - DNA, 22 bp, Artificial Sequence
  chemically synthesized
tttgagataaaaatggacgtcc

SEQ ID NO: 69297 - DNA, 22 bp, Artificial Sequence
  chemically synthesized
tgagataaaaatggacgtcccc

SEQ ID NO: 69298 - DNA, 22 bp, Artificial Sequence
  chemically synthesized
gagataaaaatggacgtcccca

SEQ ID NO: 69299 - DNA, 22 bp, Artificial Sequence
  chemically synthesized
agataaaaatggacgtccccat

SEQ ID NO: 69300 - DNA, 22 bp, Artificial Sequence
  chemically synthesized
tggaaccaaaattgggactcac

SEQ ID NO: 69301 - DNA, 22 bp, Artificial Sequence
  chemically synthesized
ggactcactgatcctcccacag

SEQ ID NO: 69302 - DNA, 22 bp, Artificial Sequence
  chemically synthesized
actgatcctcccacagtctggg

SEQ ID NO: 69303 - DNA, 22 bp, Artificial Sequence
  chemically synthesized
atcctcccacagtctggggtgt

SEQ ID NO: 69304 - DNA, 22 bp, Artificial Sequence
  chemically synthesized
ccacagtctggggtgtgagaat

SEQ ID NO: 69305 - DNA, 22 bp, Artificial Sequence
  chemically synthesized
gggtgtgagaatgttgctagtc

SEQ ID NO: 69306 - DNA, 22 bp, Artificial Sequence
  chemically synthesized
ctagtcttttttccacggaagt

SEQ ID NO: 69307 - DNA, 22 bp, Artificial Sequence
  chemically synthesized
gtcttttttccacggaagtatt

SEQ ID NO: 69308 - DNA, 22 bp, Artificial Sequence
  chemically synthesized
ttttccacggaagtattttatg

SEQ ID NO: 69309 - DNA, 22 bp, Artificial Sequence
  chemically synthesized
tttccacggaagtattttatga

SEQ ID NO: 69310 - DNA, 22 bp, Artificial Sequence
  chemically synthesized
ttccacggaagtattttatgag

SEQ ID NO: 69311 - DNA, 22 bp, Artificial Sequence
  chemically synthesized
tccacggaagtattttatgagt

SEQ ID NO: 69312 - DNA, 22 bp, Artificial Sequence
  chemically synthesized
ccacggaagtattttatgagta

SEQ ID NO: 69313 - DNA, 22 bp, Artificial Sequence
  chemically synthesized
cacggaagtattttatgagtac

SEQ ID NO: 69314 - DNA, 22 bp, Artificial Sequence
  chemically synthesized
tatgagtaccctctcattttaa

SEQ ID NO: 69315 - DNA, 22 bp, Artificial Sequence
  chemically synthesized
atgagtaccctctcattttaac

SEQ ID NO: 69316 - DNA, 22 bp, Artificial Sequence
  chemically synthesized
tgagtaccctctcattttaaca

SEQ ID NO: 69317 - DNA, 22 bp, Artificial Sequence
  chemically synthesized
tcattttaacaatatcaacaat

SEQ ID NO: 69318 - DNA, 22 bp, Artificial Sequence
  chemically synthesized
attttaacaatatcaacaatta

SEQ ID NO: 69319 - DNA, 22 bp, Artificial Sequence
  chemically synthesized
taacaatatcaacaattagtgt

SEQ ID NO: 69320 - DNA, 22 bp, Artificial Sequence
  chemically synthesized
aacaatatcaacaattagtgtg

SEQ ID NO: 69321 - DNA, 22 bp, Artificial Sequence
  chemically synthesized
acaatatcaacaattagtgtgt

SEQ ID NO: 69322 - DNA, 22 bp, Artificial Sequence
  chemically synthesized
gtgtgtttcaggctaatgctga

SEQ ID NO: 69323 - DNA, 22 bp, Artificial Sequence
  chemically synthesized
caggctaatgctgaaagcatct

SEQ ID NO: 69324 - DNA, 22 bp, Artificial Sequence
  chemically synthesized
aggctaatgctgaaagcatctt

SEQ ID NO: 69325 - DNA, 22 bp, Artificial Sequence
  chemically synthesized
atgctgaaagcatctttagggc

SEQ ID NO: 69326 - DNA, 22 bp, Artificial Sequence
  chemically synthesized
aaagcatctttagggccataga

SEQ ID NO: 69327 - DNA, 22 bp, Artificial Sequence
  chemically synthesized
tagggccatagaacattgtagt

SEQ ID NO: 69328 - DNA, 22 bp, Artificial Sequence
  chemically synthesized
agggccatagaacattgtagtg

SEQ ID NO: 69329 - DNA, 22 bp, Artificial Sequence
  chemically synthesized
gggccatagaacattgtagtga

SEQ ID NO: 69330 - DNA, 22 bp, Artificial Sequence
  chemically synthesized
tagtgagttgaccttcttcccc

SEQ ID NO: 69331 - DNA, 22 bp, Artificial Sequence
  chemically synthesized
accttcttccccttttttgata

SEQ ID NO: 69332 - DNA, 22 bp, Artificial Sequence
  chemically synthesized
cttccccttttttgatacctct

SEQ ID NO: 69333 - DNA, 22 bp, Artificial Sequence
  chemically synthesized
ttccccttttttgatacctcta

SEQ ID NO: 69334 - DNA, 22 bp, Artificial Sequence
  chemically synthesized
ccccttttttgatacctctatg

SEQ ID NO: 69335 - DNA, 22 bp, Artificial Sequence
  chemically synthesized
cccttttttgatacctctatga

SEQ ID NO: 69336 - DNA, 22 bp, Artificial Sequence
  chemically synthesized
ttttgatacctctatgaaatgt

SEQ ID NO: 69337 - DNA, 22 bp, Artificial Sequence
  chemically synthesized
tttgatacctctatgaaatgtt

SEQ ID NO: 69338 - DNA, 22 bp, Artificial Sequence
  chemically synthesized
ttgatacctctatgaaatgttt

SEQ ID NO: 69339 - DNA, 22 bp, Artificial Sequence
  chemically synthesized
tgatacctctatgaaatgtttg

SEQ ID NO: 69340 - DNA, 22 bp, Artificial Sequence
  chemically synthesized
gatacctctatgaaatgtttgc

SEQ ID NO: 69341 - DNA, 22 bp, Artificial Sequence
  chemically synthesized
atacctctatgaaatgtttgcc

SEQ ID NO: 69342 - DNA, 22 bp, Artificial Sequence
  chemically synthesized
tatgaaatgtttgcctatttag

SEQ ID NO: 69343 - DNA, 22 bp, Artificial Sequence
  chemically synthesized
tgaaatgtttgcctatttagaa

SEQ ID NO: 69344 - DNA, 22 bp, Artificial Sequence
  chemically synthesized
gcctatttagaaagttcacctg

SEQ ID NO: 69345 - DNA, 22 bp, Artificial Sequence
  chemically synthesized
cctatttagaaagttcacctgt

SEQ ID NO: 69346 - DNA, 22 bp, Artificial Sequence
  chemically synthesized
tttagaaagttcacctgtcacc

SEQ ID NO: 69347 - DNA, 22 bp, Artificial Sequence
  chemically synthesized
agaaagttcacctgtcacccag

SEQ ID NO: 69348 - DNA, 22 bp, Artificial Sequence
  chemically synthesized
gaaagttcacctgtcacccagg

SEQ ID NO: 69349 - DNA, 22 bp, Artificial Sequence
  chemically synthesized
acctgtcacccaggggggaata

SEQ ID NO: 69350 - DNA, 22 bp, Artificial Sequence
  chemically synthesized
tcacccaggggggaatagaaag

SEQ ID NO: 69351 - DNA, 22 bp, Artificial Sequence
  chemically synthesized
ggatttaggaagccaaaaagtt

SEQ ID NO: 69352 - DNA, 22 bp, Artificial Sequence
  chemically synthesized
aggaagccaaaaagtttccttg

SEQ ID NO: 69353 - DNA, 22 bp, Artificial Sequence
  chemically synthesized
ggaagccaaaaagtttccttgg

SEQ ID NO: 69354 - DNA, 22 bp, Artificial Sequence
  chemically synthesized
ccttgggtcaccttgtccaagt

SEQ ID NO: 69355 - DNA, 22 bp, Artificial Sequence
  chemically synthesized
cttgggtcaccttgtccaagtt

SEQ ID NO: 69356 - DNA, 22 bp, Artificial Sequence
  chemically synthesized
gggtcaccttgtccaagtttct

SEQ ID NO: 69357 - DNA, 22 bp, Artificial Sequence
  chemically synthesized
ggtcaccttgtccaagtttctc

SEQ ID NO: 69358 - DNA, 22 bp, Artificial Sequence
  chemically synthesized
gtccaagtttctcacttaacaa

SEQ ID NO: 69359 - DNA, 22 bp, Artificial Sequence
  chemically synthesized
tccaagtttctcacttaacaag

SEQ ID NO: 69360 - DNA, 22 bp, Artificial Sequence
  chemically synthesized
ctcacttaacaaggaggaaaca

SEQ ID NO: 69361 - DNA, 22 bp, Artificial Sequence
  chemically synthesized
tcacttaacaaggaggaaacag

SEQ ID NO: 69362 - DNA, 22 bp, Artificial Sequence
  chemically synthesized
acttaacaaggaggaaacagag

SEQ ID NO: 69363 - DNA, 22 bp, Artificial Sequence
  chemically synthesized
aacaaggaggaaacagaggcac

SEQ ID NO: 69364 - DNA, 22 bp, Artificial Sequence
  chemically synthesized
acaaggaggaaacagaggcaca

SEQ ID NO: 69365 - DNA, 22 bp, Artificial Sequence
  chemically synthesized
gccccaaactacagctgatgga

SEQ ID NO: 69366 - DNA, 22 bp, Artificial Sequence
  chemically synthesized
ccccaaactacagctgatggaa

SEQ ID NO: 69367 - DNA, 22 bp, Artificial Sequence
  chemically synthesized
cagctgatggaactggaaagtt

SEQ ID NO: 69368 - DNA, 22 bp, Artificial Sequence
  chemically synthesized
atggaactggaaagtttagaag

SEQ ID NO: 69369 - DNA, 22 bp, Artificial Sequence
  chemically synthesized
gaaagtttagaagacatttgtt

SEQ ID NO: 69370 - DNA, 22 bp, Artificial Sequence
  chemically synthesized
agaagacatttgttgaggtgcc

SEQ ID NO: 69371 - DNA, 22 bp, Artificial Sequence
  chemically synthesized
gaagacatttgttgaggtgcct

SEQ ID NO: 69372 - DNA, 22 bp, Artificial Sequence
  chemically synthesized
gttgaggtgcctagaatgtagg

SEQ ID NO: 69373 - DNA, 22 bp, Artificial Sequence
  chemically synthesized
ttgaggtgcctagaatgtaggg

SEQ ID NO: 69374 - DNA, 22 bp, Artificial Sequence
  chemically synthesized
aggtgcctagaatgtagggacc

SEQ ID NO: 69375 - DNA, 22 bp, Artificial Sequence
  chemically synthesized
gaatgtagggaccttcatcctc

SEQ ID NO: 69376 - DNA, 22 bp, Artificial Sequence
  chemically synthesized
catcctcaagccagaactggtc

SEQ ID NO: 69377 - DNA, 22 bp, Artificial Sequence
  chemically synthesized
atcctcaagccagaactggtca

SEQ ID NO: 69378 - DNA, 22 bp, Artificial Sequence
  chemically synthesized
aagccagaactggtcaggattt

SEQ ID NO: 69379 - DNA, 22 bp, Artificial Sequence
  chemically synthesized
gtcaggatttttctgctttggg

SEQ ID NO: 69380 - DNA, 22 bp, Artificial Sequence
  chemically synthesized
ttctgctttggggattggatat

SEQ ID NO: 69381 - DNA, 22 bp, Artificial Sequence
  chemically synthesized
tctgctttggggattggatata

SEQ ID NO: 69382 - DNA, 22 bp, Artificial Sequence
  chemically synthesized
ctgctttggggattggatataa

SEQ ID NO: 69383 - DNA, 22 bp, Artificial Sequence
  chemically synthesized
tgctttggggattggatataaa

SEQ ID NO: 69384 - DNA, 22 bp, Artificial Sequence
  chemically synthesized
ctttggggattggatataaaat

SEQ ID NO: 69385 - DNA, 22 bp, Artificial Sequence
  chemically synthesized
tggggattggatataaaatttc

SEQ ID NO: 69386 - DNA, 22 bp, Artificial Sequence
  chemically synthesized
ggggattggatataaaatttct

SEQ ID NO: 69387 - DNA, 22 bp, Artificial Sequence
  chemically synthesized
gggattggatataaaatttcta

SEQ ID NO: 69388 - DNA, 22 bp, Artificial Sequence
  chemically synthesized
gatataaaatttctagaactga

SEQ ID NO: 69389 - DNA, 22 bp, Artificial Sequence
  chemically synthesized
ctagaactgagtttaatggcag

SEQ ID NO: 69390 - DNA, 22 bp, Artificial Sequence
  chemically synthesized
tagaactgagtttaatggcagg

SEQ ID NO: 69391 - DNA, 22 bp, Artificial Sequence
  chemically synthesized
gaactgagtttaatggcaggaa

SEQ ID NO: 69392 - DNA, 22 bp, Artificial Sequence
  chemically synthesized
agtttaatggcaggaagatcaa

SEQ ID NO: 69393 - DNA, 22 bp, Artificial Sequence
  chemically synthesized
aatggcaggaagatcaattgga

SEQ ID NO: 69394 - DNA, 22 bp, Artificial Sequence
  chemically synthesized
atggcaggaagatcaattggac

SEQ ID NO: 69395 - DNA, 22 bp, Artificial Sequence
  chemically synthesized
gaccaatatttactgggtaccc

SEQ ID NO: 69396 - DNA, 22 bp, Artificial Sequence
  chemically synthesized
actgggtacccatgctcagacg

SEQ ID NO: 69397 - DNA, 22 bp, Artificial Sequence
  chemically synthesized
ctgggtacccatgctcagacgt

SEQ ID NO: 69398 - DNA, 22 bp, Artificial Sequence
  chemically synthesized
ggtacccatgctcagacgtgcc

SEQ ID NO: 69399 - DNA, 22 bp, Artificial Sequence
  chemically synthesized
agacgtgccaggcacagggggt

SEQ ID NO: 69400 - DNA, 22 bp, Artificial Sequence
  chemically synthesized
aggccttggggttgaggggtgg

SEQ ID NO: 69401 - DNA, 22 bp, Artificial Sequence
  chemically synthesized
ggccttggggttgaggggtggg

SEQ ID NO: 69402 - DNA, 22 bp, Artificial Sequence
  chemically synthesized
ggggttgaggggtgggggcagg

SEQ ID NO: 69403 - DNA, 22 bp, Artificial Sequence
  chemically synthesized
gggttgaggggtgggggcaggg

SEQ ID NO: 69404 - DNA, 22 bp, Artificial Sequence
  chemically synthesized
aggggtgggggcagggaaggct

SEQ ID NO: 69405 - DNA, 22 bp, Artificial Sequence
  chemically synthesized
gaggtggaacataaataagcaa

SEQ ID NO: 69406 - DNA, 22 bp, Artificial Sequence
  chemically synthesized
ctgatgcccgcctcagtgatta

SEQ ID NO: 69407 - DNA, 22 bp, Artificial Sequence
  chemically synthesized
atgcccgcctcagtgattaaac

SEQ ID NO: 69408 - DNA, 22 bp, Artificial Sequence
  chemically synthesized
agtgattaaacattgatgttgg

SEQ ID NO: 69409 - DNA, 22 bp, Artificial Sequence
  chemically synthesized
aacattgatgttggtgttgtat

SEQ ID NO: 69410 - DNA, 22 bp, Artificial Sequence
  chemically synthesized
atgttggtgttgtattattttg

SEQ ID NO: 69411 - DNA, 22 bp, Artificial Sequence
  chemically synthesized
gtgttgtattattttgcaggta

SEQ ID NO: 69412 - DNA, 22 bp, Artificial Sequence
  chemically synthesized
tattattttgcaggtaaagatg

SEQ ID NO: 69413 - DNA, 22 bp, Artificial Sequence
  chemically synthesized
ttttgcaggtaaagatgagccc

SEQ ID NO: 69414 - DNA, 22 bp, Artificial Sequence
  chemically synthesized
tgcaggtaaagatgagcccagc

SEQ ID NO: 69415 - DNA, 22 bp, Artificial Sequence
  chemically synthesized
gcaggtaaagatgagcccagca

SEQ ID NO: 69416 - DNA, 22 bp, Artificial Sequence
  chemically synthesized
caggtaaagatgagcccagcag

SEQ ID NO: 69417 - DNA, 22 bp, Artificial Sequence
  chemically synthesized
cacatgtacaacttgcaaacag

SEQ ID NO: 69418 - DNA, 22 bp, Artificial Sequence
  chemically synthesized
gcaaacagccattcaccagtgc

SEQ ID NO: 69419 - DNA, 22 bp, Artificial Sequence
  chemically synthesized
caaacagccattcaccagtgca

SEQ ID NO: 69420 - DNA, 22 bp, Artificial Sequence
  chemically synthesized
accagtgcatggtttctcttgc

SEQ ID NO: 69421 - DNA, 22 bp, Artificial Sequence
  chemically synthesized
ctcttgcaacacgcacagaaca

SEQ ID NO: 69422 - DNA, 22 bp, Artificial Sequence
  chemically synthesized
tcttgcaacacgcacagaacac

SEQ ID NO: 69423 - DNA, 22 bp, Artificial Sequence
  chemically synthesized
ttgcaacacgcacagaacactc

SEQ ID NO: 69424 - DNA, 22 bp, Artificial Sequence
  chemically synthesized
gcaacacgcacagaacactcat

SEQ ID NO: 69425 - DNA, 22 bp, Artificial Sequence
  chemically synthesized
caacacgcacagaacactcatg

SEQ ID NO: 69426 - DNA, 22 bp, Artificial Sequence
  chemically synthesized
atggattaagaatctacttaga

SEQ ID NO: 69427 - DNA, 22 bp, Artificial Sequence
  chemically synthesized
agaatctacttagaaagcgaac

SEQ ID NO: 69428 - DNA, 22 bp, Artificial Sequence
  chemically synthesized
cttagaaagcgaacacggaagt

SEQ ID NO: 69429 - DNA, 22 bp, Artificial Sequence
  chemically synthesized
agaaagcgaacacggaagtccc

SEQ ID NO: 69430 - DNA, 22 bp, Artificial Sequence
  chemically synthesized
gaaagcgaacacggaagtcccc

SEQ ID NO: 69431 - DNA, 22 bp, Artificial Sequence
  chemically synthesized
accccgcgggttggtatccctt

SEQ ID NO: 69432 - DNA, 22 bp, Artificial Sequence
  chemically synthesized
gtatcccttcaggactaggtgc

SEQ ID NO: 69433 - DNA, 22 bp, Artificial Sequence
  chemically synthesized
caggactaggtgcagaatgtcc

SEQ ID NO: 69434 - DNA, 22 bp, Artificial Sequence
  chemically synthesized
aggactaggtgcagaatgtcct

SEQ ID NO: 69435 - DNA, 22 bp, Artificial Sequence
  chemically synthesized
ggtgcagaatgtccttcccagc

SEQ ID NO: 69436 - DNA, 22 bp, Artificial Sequence
  chemically synthesized
cccagccacctctccatgggat

SEQ ID NO: 69437 - DNA, 22 bp, Artificial Sequence
  chemically synthesized
ccagccacctctccatgggatt

SEQ ID NO: 69438 - DNA, 22 bp, Artificial Sequence
  chemically synthesized
tccatgggattcatattgcaga

SEQ ID NO: 69439 - DNA, 22 bp, Artificial Sequence
  chemically synthesized
catgggattcatattgcagaca

SEQ ID NO: 69440 - DNA, 22 bp, Artificial Sequence
  chemically synthesized
atattgcagacaataacccctt

SEQ ID NO: 69441 - DNA, 22 bp, Artificial Sequence
  chemically synthesized
cagacaataacccctttaacct

SEQ ID NO: 69442 - DNA, 22 bp, Artificial Sequence
  chemically synthesized
taacctgctaagaataccagga

SEQ ID NO: 69443 - DNA, 22 bp, Artificial Sequence
  chemically synthesized
aacctgctaagaataccaggat

SEQ ID NO: 69444 - DNA, 22 bp, Artificial Sequence
  chemically synthesized
acctgctaagaataccaggatc

SEQ ID NO: 69445 - DNA, 22 bp, Artificial Sequence
  chemically synthesized
ctaagaataccaggatcagtat

SEQ ID NO: 69446 - DNA, 22 bp, Artificial Sequence
  chemically synthesized
agaataccaggatcagtatcga

SEQ ID NO: 69447 - DNA, 22 bp, Artificial Sequence
  chemically synthesized
ccggcctggcagaagggcgctt

SEQ ID NO: 69448 - DNA, 22 bp, Artificial Sequence
  chemically synthesized
cggcctggcagaagggcgcttt

SEQ ID NO: 69449 - DNA, 22 bp, Artificial Sequence
  chemically synthesized
gcagaagggcgctttccaccca

SEQ ID NO: 69450 - DNA, 22 bp, Artificial Sequence
  chemically synthesized
tccacccactccccccctgttt

SEQ ID NO: 69451 - DNA, 22 bp, Artificial Sequence
  chemically synthesized
ccacccactccccccctgttta

SEQ ID NO: 69452 - DNA, 22 bp, Artificial Sequence
  chemically synthesized
cacccactccccccctgtttag

SEQ ID NO: 69453 - DNA, 22 bp, Artificial Sequence
  chemically synthesized
cccccctgtttagtccaccacc

SEQ ID NO: 69454 - DNA, 22 bp, Artificial Sequence
  chemically synthesized
tttagtccaccaccgagacatc

SEQ ID NO: 69455 - DNA, 22 bp, Artificial Sequence
  chemically synthesized
agtccaccaccgagacatcact

SEQ ID NO: 69456 - DNA, 22 bp, Artificial Sequence
  chemically synthesized
gtccaccaccgagacatcactt

SEQ ID NO: 69457 - DNA, 22 bp, Artificial Sequence
  chemically synthesized
ggacccccaccgcatagagcgc

SEQ ID NO: 69458 - DNA, 22 bp, Artificial Sequence
  chemically synthesized
gacccccaccgcatagagcgcc

SEQ ID NO: 69459 - DNA, 22 bp, Artificial Sequence
  chemically synthesized
ggggcggaagagatggccctgg

SEQ ID NO: 69460 - DNA, 22 bp, Artificial Sequence
  chemically synthesized
gccacccatcacccgagtgcct

SEQ ID NO: 69461 - DNA, 22 bp, Artificial Sequence
  chemically synthesized
tgacagggtgctgcggttgaat

SEQ ID NO: 69462 - DNA, 22 bp, Artificial Sequence
  chemically synthesized
gacagggtgctgcggttgaatc

SEQ ID NO: 69463 - DNA, 22 bp, Artificial Sequence
  chemically synthesized
acagggtgctgcggttgaatcc

SEQ ID NO: 69464 - DNA, 22 bp, Artificial Sequence
  chemically synthesized
cggttgaatccaatggctatgg

SEQ ID NO: 69465 - DNA, 22 bp, Artificial Sequence
  chemically synthesized
aatccaatggctatggagcctc

SEQ ID NO: 69466 - DNA, 22 bp, Artificial Sequence
  chemically synthesized
tggagcctcccgccatggattt

SEQ ID NO: 69467 - DNA, 22 bp, Artificial Sequence
  chemically synthesized
ccgccatggatttctctaggag

SEQ ID NO: 69468 - DNA, 22 bp, Artificial Sequence
  chemically synthesized
ctctaggagacttagagagctg

SEQ ID NO: 69469 - DNA, 22 bp, Artificial Sequence
  chemically synthesized
tctaggagacttagagagctgg

SEQ ID NO: 69470 - DNA, 22 bp, Artificial Sequence
  chemically synthesized
taggagacttagagagctggca

SEQ ID NO: 69471 - DNA, 22 bp, Artificial Sequence
  chemically synthesized
ggagacttagagagctggcagg

SEQ ID NO: 69472 - DNA, 22 bp, Artificial Sequence
  chemically synthesized
agagagctggcagggaacacgt

SEQ ID NO: 69473 - DNA, 22 bp, Artificial Sequence
  chemically synthesized
gagagctggcagggaacacgtc

SEQ ID NO: 69474 - DNA, 22 bp, Artificial Sequence
  chemically synthesized
gcagggaacacgtctagcccac

SEQ ID NO: 69475 - DNA, 22 bp, Artificial Sequence
  chemically synthesized
gcccaccgctgtccccaggccg

SEQ ID NO: 69476 - DNA, 22 bp, Artificial Sequence
  chemically synthesized
tccccaggccggcccagcccta

SEQ ID NO: 69477 - DNA, 22 bp, Artificial Sequence
  chemically synthesized
tgcaaaggttactgcaaccatt

SEQ ID NO: 69478 - DNA, 22 bp, Artificial Sequence
  chemically synthesized
ctgcaaccattccagccaggta

SEQ ID NO: 69479 - DNA, 22 bp, Artificial Sequence
  chemically synthesized
caaccattccagccaggtagca

SEQ ID NO: 69480 - DNA, 22 bp, Artificial Sequence
  chemically synthesized
cagccaggtagcaagccgccct

SEQ ID NO: 69481 - DNA, 22 bp, Artificial Sequence
  chemically synthesized
cctggcgacgccccccctccct

SEQ ID NO: 69482 - DNA, 22 bp, Artificial Sequence
  chemically synthesized
ctggcgacgccccccctccctc

SEQ ID NO: 69483 - DNA, 22 bp, Artificial Sequence
  chemically synthesized
gcgacgccccccctccctcctc

SEQ ID NO: 69484 - DNA, 22 bp, Artificial Sequence
  chemically synthesized
cctcctctgcaatccgcccctc

SEQ ID NO: 69485 - DNA, 22 bp, Artificial Sequence
  chemically synthesized
ctctgcaatccgcccctcctcc

SEQ ID NO: 69486 - DNA, 22 bp, Artificial Sequence
  chemically synthesized
tgcaatccgcccctcctccctc

SEQ ID NO: 69487 - DNA, 22 bp, Artificial Sequence
  chemically synthesized
caatccgcccctcctccctccc

SEQ ID NO: 69488 - DNA, 22 bp, Artificial Sequence
  chemically synthesized
ctccctcccagcccccggtcaa

SEQ ID NO: 69489 - DNA, 22 bp, Artificial Sequence
  chemically synthesized
cctcccagcccccggtcaagtc

SEQ ID NO: 69490 - DNA, 22 bp, Artificial Sequence
  chemically synthesized
ccagcccccggtcaagtccaag

SEQ ID NO: 69491 - DNA, 22 bp, Artificial Sequence
  chemically synthesized
tgcggcaagacgttcaaatttc

SEQ ID NO: 69492 - DNA, 22 bp, Artificial Sequence
  chemically synthesized
cggcaagacgttcaaatttcag

SEQ ID NO: 69493 - DNA, 22 bp, Artificial Sequence
  chemically synthesized
aaatttcagagcaacctggtgg

SEQ ID NO: 69494 - DNA, 22 bp, Artificial Sequence
  chemically synthesized
cagagcaacctggtggtgcacc

SEQ ID NO: 69495 - DNA, 22 bp, Artificial Sequence
  chemically synthesized
agagcaacctggtggtgcaccg

SEQ ID NO: 69496 - DNA, 22 bp, Artificial Sequence
  chemically synthesized
gtggtgcaccggcgcagccaca

SEQ ID NO: 69497 - DNA, 22 bp, Artificial Sequence
  chemically synthesized
caagtgcaacctgtgcgaccac

SEQ ID NO: 69498 - DNA, 22 bp, Artificial Sequence
  chemically synthesized
tgcgaccacgcgtgcacccagg

SEQ ID NO: 69499 - DNA, 22 bp, Artificial Sequence
  chemically synthesized
aagcgccacatgaagacgcaca

SEQ ID NO: 69500 - DNA, 22 bp, Artificial Sequence
  chemically synthesized
tccaccgccagctccccggaac

SEQ ID NO: 69501 - DNA, 22 bp, Artificial Sequence
  chemically synthesized
caccgccagctccccggaaccc

SEQ ID NO: 69502 - DNA, 22 bp, Artificial Sequence
  chemically synthesized
cccggaacccggcaccagcgac

SEQ ID NO: 69503 - DNA, 22 bp, Artificial Sequence
  chemically synthesized
ggtgggcagcgccagcagcgcg

SEQ ID NO: 69504 - DNA, 22 bp, Artificial Sequence
  chemically synthesized
gtgggcagcgccagcagcgcgc

SEQ ID NO: 69505 - DNA, 22 bp, Artificial Sequence
  chemically synthesized
aagtccgtggtggccaagttca

SEQ ID NO: 69506 - DNA, 22 bp, Artificial Sequence
  chemically synthesized
aagagcgagaacgaccccaacc

SEQ ID NO: 69507 - DNA, 22 bp, Artificial Sequence
  chemically synthesized
atcccggagaacggggacgagg

SEQ ID NO: 69508 - DNA, 22 bp, Artificial Sequence
  chemically synthesized
acggagagcgagagggtggact

SEQ ID NO: 69509 - DNA, 22 bp, Artificial Sequence
  chemically synthesized
cggcttcgggctgagcctggag

SEQ ID NO: 69510 - DNA, 22 bp, Artificial Sequence
  chemically synthesized
cgggctgagcctggaggcggcg

SEQ ID NO: 69511 - DNA, 22 bp, Artificial Sequence
  chemically synthesized
gggctgagcctggaggcggcgc

SEQ ID NO: 69512 - DNA, 22 bp, Artificial Sequence
  chemically synthesized
agcctggaggcggcgcgccacc

SEQ ID NO: 69513 - DNA, 22 bp, Artificial Sequence
  chemically synthesized
gaggcggcgcgccaccacgaga

SEQ ID NO: 69514 - DNA, 22 bp, Artificial Sequence
  chemically synthesized
gcggggcgcggtcgtgggcgtg

SEQ ID NO: 69515 - DNA, 22 bp, Artificial Sequence
  chemically synthesized
cccgacgtcatgcagggcatgg

SEQ ID NO: 69516 - DNA, 22 bp, Artificial Sequence
  chemically synthesized
agctccatgcagcacttcagcg

SEQ ID NO: 69517 - DNA, 22 bp, Artificial Sequence
  chemically synthesized
catgcagcacttcagcgaggcc

SEQ ID NO: 69518 - DNA, 22 bp, Artificial Sequence
  chemically synthesized
cagcgaggccttccaccaggtc

SEQ ID NO: 69519 - DNA, 22 bp, Artificial Sequence
  chemically synthesized
agcgaggccttccaccaggtcc

SEQ ID NO: 69520 - DNA, 22 bp, Artificial Sequence
  chemically synthesized
ccaccaggtcctgggcgagaag

SEQ ID NO: 69521 - DNA, 22 bp, Artificial Sequence
  chemically synthesized
caccaggtcctgggcgagaagc

SEQ ID NO: 69522 - DNA, 22 bp, Artificial Sequence
  chemically synthesized
ggcgagaagcataagcgcggcc

SEQ ID NO: 69523 - DNA, 22 bp, Artificial Sequence
  chemically synthesized
gccgaggccgagggccacaggg

SEQ ID NO: 69524 - DNA, 22 bp, Artificial Sequence
  chemically synthesized
gcgacgaagactcggtggccgg

SEQ ID NO: 69525 - DNA, 22 bp, Artificial Sequence
  chemically synthesized
cgacgaagactcggtggccggc

SEQ ID NO: 69526 - DNA, 22 bp, Artificial Sequence
  chemically synthesized
ggtggccggcgagtcggaccgc

SEQ ID NO: 69527 - DNA, 22 bp, Artificial Sequence
  chemically synthesized
ttaatggccgcggctgctcccc

SEQ ID NO: 69528 - DNA, 22 bp, Artificial Sequence
  chemically synthesized
atggccgcggctgctccccggg

SEQ ID NO: 69529 - DNA, 22 bp, Artificial Sequence
  chemically synthesized
ctccccgggcgagtcggcctcg

SEQ ID NO: 69530 - DNA, 22 bp, Artificial Sequence
  chemically synthesized
cccgggcgagtcggcctcgggg

SEQ ID NO: 69531 - DNA, 22 bp, Artificial Sequence
  chemically synthesized
ggggggcctgtccaaaaagctg

SEQ ID NO: 69532 - DNA, 22 bp, Artificial Sequence
  chemically synthesized
tccaaaaagctgctgctgggca

SEQ ID NO: 69533 - DNA, 22 bp, Artificial Sequence
  chemically synthesized
ctgctgggcagccccagctcgc

SEQ ID NO: 69534 - DNA, 22 bp, Artificial Sequence
  chemically synthesized
ctgggcagccccagctcgctga

SEQ ID NO: 69535 - DNA, 22 bp, Artificial Sequence
  chemically synthesized
ggcagccccagctcgctgagcc

SEQ ID NO: 69536 - DNA, 22 bp, Artificial Sequence
  chemically synthesized
gctgagccccttctctaagcgc

SEQ ID NO: 69537 - DNA, 22 bp, Artificial Sequence
  chemically synthesized
agccccttctctaagcgcatca

SEQ ID NO: 69538 - DNA, 22 bp, Artificial Sequence
  chemically synthesized
ctctaagcgcatcaagctcgag

SEQ ID NO: 69539 - DNA, 22 bp, Artificial Sequence
  chemically synthesized
tctaagcgcatcaagctcgaga

SEQ ID NO: 69540 - DNA, 22 bp, Artificial Sequence
  chemically synthesized
taagcgcatcaagctcgagaag

SEQ ID NO: 69541 - DNA, 22 bp, Artificial Sequence
  chemically synthesized
agcgcatcaagctcgagaagga

SEQ ID NO: 69542 - DNA, 22 bp, Artificial Sequence
  chemically synthesized
gagaaggagttcgacctgcccc

SEQ ID NO: 69543 - DNA, 22 bp, Artificial Sequence
  chemically synthesized
gacctgcccccggccgcgatgc

SEQ ID NO: 69544 - DNA, 22 bp, Artificial Sequence
  chemically synthesized
cccccggccgcgatgcccaaca

SEQ ID NO: 69545 - DNA, 22 bp, Artificial Sequence
  chemically synthesized
gcagtggctcgccggctacgcg

SEQ ID NO: 69546 - DNA, 22 bp, Artificial Sequence
  chemically synthesized
gccggctacgcggcctccaggc

SEQ ID NO: 69547 - DNA, 22 bp, Artificial Sequence
  chemically synthesized
cgcggcctccaggcagctcaaa

SEQ ID NO: 69548 - DNA, 22 bp, Artificial Sequence
  chemically synthesized
caggcagctcaaagatcccttc

SEQ ID NO: 69549 - DNA, 22 bp, Artificial Sequence
  chemically synthesized
aaagatcccttccttagcttcg

SEQ ID NO: 69550 - DNA, 22 bp, Artificial Sequence
  chemically synthesized
ccttagcttcggagactccaga

SEQ ID NO: 69551 - DNA, 22 bp, Artificial Sequence
  chemically synthesized
cttagcttcggagactccagac

SEQ ID NO: 69552 - DNA, 22 bp, Artificial Sequence
  chemically synthesized
agcttcggagactccagacaat

SEQ ID NO: 69553 - DNA, 22 bp, Artificial Sequence
  chemically synthesized
gcttcggagactccagacaatc

SEQ ID NO: 69554 - DNA, 22 bp, Artificial Sequence
  chemically synthesized
cggagactccagacaatcgcct

SEQ ID NO: 69555 - DNA, 22 bp, Artificial Sequence
  chemically synthesized
ggagactccagacaatcgcctt

SEQ ID NO: 69556 - DNA, 22 bp, Artificial Sequence
  chemically synthesized
cagacaatcgccttttgcctcc

SEQ ID NO: 69557 - DNA, 22 bp, Artificial Sequence
  chemically synthesized
ttgcctcctcgtcggagcactc

SEQ ID NO: 69558 - DNA, 22 bp, Artificial Sequence
  chemically synthesized
tgcctcctcgtcggagcactcc

SEQ ID NO: 69559 - DNA, 22 bp, Artificial Sequence
  chemically synthesized
gcctcctcgtcggagcactcct

SEQ ID NO: 69560 - DNA, 22 bp, Artificial Sequence
  chemically synthesized
cctcctcgtcggagcactcctc

SEQ ID NO: 69561 - DNA, 22 bp, Artificial Sequence
  chemically synthesized
ctcgtcggagcactcctcggag

SEQ ID NO: 69562 - DNA, 22 bp, Artificial Sequence
  chemically synthesized
gtcggagcactcctcggagaac

SEQ ID NO: 69563 - DNA, 22 bp, Artificial Sequence
  chemically synthesized
ctcggagaacgggagtttgcgc

SEQ ID NO: 69564 - DNA, 22 bp, Artificial Sequence
  chemically synthesized
ggagaacgggagtttgcgcttc

SEQ ID NO: 69565 - DNA, 22 bp, Artificial Sequence
  chemically synthesized
gcgcttctccacaccgcccggg

SEQ ID NO: 69566 - DNA, 22 bp, Artificial Sequence
  chemically synthesized
cgcttctccacaccgcccgggg

SEQ ID NO: 69567 - DNA, 22 bp, Artificial Sequence
  chemically synthesized
ctccacaccgcccggggagctg

SEQ ID NO: 69568 - DNA, 22 bp, Artificial Sequence
  chemically synthesized
tccacaccgcccggggagctgg

SEQ ID NO: 69569 - DNA, 22 bp, Artificial Sequence
  chemically synthesized
cacaccgcccggggagctggac

SEQ ID NO: 69570 - DNA, 22 bp, Artificial Sequence
  chemically synthesized
gacggagggatctcggggcgca

SEQ ID NO: 69571 - DNA, 22 bp, Artificial Sequence
  chemically synthesized
ggggcgcagcggcacgggaagt

SEQ ID NO: 69572 - DNA, 22 bp, Artificial Sequence
  chemically synthesized
gtggtccgggcccgggcaggcc

SEQ ID NO: 69573 - DNA, 22 bp, Artificial Sequence
  chemically synthesized
aaaagagggcagacgcagcgac

SEQ ID NO: 69574 - DNA, 22 bp, Artificial Sequence
  chemically synthesized
gtgagtactgtgggaaagtctt

SEQ ID NO: 69575 - DNA, 22 bp, Artificial Sequence
  chemically synthesized
tgagtactgtgggaaagtcttc

SEQ ID NO: 69576 - DNA, 22 bp, Artificial Sequence
  chemically synthesized
tgggaaagtcttcaagaactgt

SEQ ID NO: 69577 - DNA, 22 bp, Artificial Sequence
  chemically synthesized
caagaactgtagcaatctcact

SEQ ID NO: 69578 - DNA, 22 bp, Artificial Sequence
  chemically synthesized
aagaactgtagcaatctcactg

SEQ ID NO: 69579 - DNA, 22 bp, Artificial Sequence
  chemically synthesized
tagcaatctcactgtccacagg

SEQ ID NO: 69580 - DNA, 22 bp, Artificial Sequence
  chemically synthesized
actgtccacaggagaagccaca

SEQ ID NO: 69581 - DNA, 22 bp, Artificial Sequence
  chemically synthesized
tccacaggagaagccacacggg

SEQ ID NO: 69582 - DNA, 22 bp, Artificial Sequence
  chemically synthesized
ataaatgcgagctgtgcaacta

SEQ ID NO: 69583 - DNA, 22 bp, Artificial Sequence
  chemically synthesized
taaatgcgagctgtgcaactat

SEQ ID NO: 69584 - DNA, 22 bp, Artificial Sequence
  chemically synthesized
tgcaactatgcctgtgcccaga

SEQ ID NO: 69585 - DNA, 22 bp, Artificial Sequence
  chemically synthesized
tgcctgtgcccagagtagcaag

SEQ ID NO: 69586 - DNA, 22 bp, Artificial Sequence
  chemically synthesized
tgcccagagtagcaagctcacc

SEQ ID NO: 69587 - DNA, 22 bp, Artificial Sequence
  chemically synthesized
accaggcacatgaaaacgcatg

SEQ ID NO: 69588 - DNA, 22 bp, Artificial Sequence
  chemically synthesized
acaaatgtgaaatttgtaagat

SEQ ID NO: 69589 - DNA, 22 bp, Artificial Sequence
  chemically synthesized
caaatgtgaaatttgtaagatg

SEQ ID NO: 69590 - DNA, 22 bp, Artificial Sequence
  chemically synthesized
gtaagatgccttttagcgtgta

SEQ ID NO: 69591 - DNA, 22 bp, Artificial Sequence
  chemically synthesized
taagatgccttttagcgtgtac

SEQ ID NO: 69592 - DNA, 22 bp, Artificial Sequence
  chemically synthesized
ttagcgtgtacagtaccctgga

SEQ ID NO: 69593 - DNA, 22 bp, Artificial Sequence
  chemically synthesized
tagcgtgtacagtaccctggag

SEQ ID NO: 69594 - DNA, 22 bp, Artificial Sequence
  chemically synthesized
agcgtgtacagtaccctggaga

SEQ ID NO: 69595 - DNA, 22 bp, Artificial Sequence
  chemically synthesized
gcgtgtacagtaccctggagaa

SEQ ID NO: 69596 - DNA, 22 bp, Artificial Sequence
  chemically synthesized
gagaaacacatgaaaaaatggc

SEQ ID NO: 69597 - DNA, 22 bp, Artificial Sequence
  chemically synthesized
aataatgatataaaaactgaat

SEQ ID NO: 69598 - DNA, 22 bp, Artificial Sequence
  chemically synthesized
aatagaggtatattaatacccc

SEQ ID NO: 69599 - DNA, 22 bp, Artificial Sequence
  chemically synthesized
atacccctccctcactcccacc

SEQ ID NO: 69600 - DNA, 22 bp, Artificial Sequence
  chemically synthesized
cctcactcccacctgacacccc

SEQ ID NO: 69601 - DNA, 22 bp, Artificial Sequence
  chemically synthesized
actcccacctgacacccccttt

SEQ ID NO: 69602 - DNA, 22 bp, Artificial Sequence
  chemically synthesized
ccacctgacaccccctttttca

SEQ ID NO: 69603 - DNA, 22 bp, Artificial Sequence
  chemically synthesized
acaccccctttttcaccactcc

SEQ ID NO: 69604 - DNA, 22 bp, Artificial Sequence
  chemically synthesized
tttcaccactccccttccccat

SEQ ID NO: 69605 - DNA, 22 bp, Artificial Sequence
  chemically synthesized
ttcaccactccccttccccatc

SEQ ID NO: 69606 - DNA, 22 bp, Artificial Sequence
  chemically synthesized
tcaccactccccttccccatcg

SEQ ID NO: 69607 - DNA, 22 bp, Artificial Sequence
  chemically synthesized
caccactccccttccccatcgc

SEQ ID NO: 69608 - DNA, 22 bp, Artificial Sequence
  chemically synthesized
accactccccttccccatcgcc

SEQ ID NO: 69609 - DNA, 22 bp, Artificial Sequence
  chemically synthesized
cccttccccatcgccctccagc

SEQ ID NO: 69610 - DNA, 22 bp, Artificial Sequence
  chemically synthesized
ccccatcgccctccagccccac

SEQ ID NO: 69611 - DNA, 22 bp, Artificial Sequence
  chemically synthesized
cccatcgccctccagccccact

SEQ ID NO: 69612 - DNA, 22 bp, Artificial Sequence
  chemically synthesized
cagccccactccctgtaggatt

SEQ ID NO: 69613 - DNA, 22 bp, Artificial Sequence
  chemically synthesized
cctgtaggatttttttctagtc

SEQ ID NO: 69614 - DNA, 22 bp, Artificial Sequence
  chemically synthesized
taggatttttttctagtcccat

SEQ ID NO: 69615 - DNA, 22 bp, Artificial Sequence
  chemically synthesized
ttttctagtcccatgtgattta

SEQ ID NO: 69616 - DNA, 22 bp, Artificial Sequence
  chemically synthesized
tttctagtcccatgtgatttaa

SEQ ID NO: 69617 - DNA, 22 bp, Artificial Sequence
  chemically synthesized
ttctagtcccatgtgatttaaa

SEQ ID NO: 69618 - DNA, 22 bp, Artificial Sequence
  chemically synthesized
tctagtcccatgtgatttaaac

SEQ ID NO: 69619 - DNA, 22 bp, Artificial Sequence
  chemically synthesized
ctagtcccatgtgatttaaaca

SEQ ID NO: 69620 - DNA, 22 bp, Artificial Sequence
  chemically synthesized
tagtcccatgtgatttaaacaa

SEQ ID NO: 69621 - DNA, 22 bp, Artificial Sequence
  chemically synthesized
gtcccatgtgatttaaacaaac

SEQ ID NO: 69622 - DNA, 22 bp, Artificial Sequence
  chemically synthesized
aaacaaacaaacaaacaaacag

SEQ ID NO: 69623 - DNA, 22 bp, Artificial Sequence
  chemically synthesized
aacaaacaaacaaacaaacaga

SEQ ID NO: 69624 - DNA, 22 bp, Artificial Sequence
  chemically synthesized
agaatatgagagtgcttgtcac

SEQ ID NO: 69625 - DNA, 22 bp, Artificial Sequence
  chemically synthesized
gtcaccagcacacctgtttttt

SEQ ID NO: 69626 - DNA, 22 bp, Artificial Sequence
  chemically synthesized
tcaccagcacacctgttttttt

SEQ ID NO: 69627 - DNA, 22 bp, Artificial Sequence
  chemically synthesized
ttttttttctttttctttttct

SEQ ID NO: 69628 - DNA, 22 bp, Artificial Sequence
  chemically synthesized
tttttctttttctttttctttt

SEQ ID NO: 69629 - DNA, 22 bp, Artificial Sequence
  chemically synthesized
ttttctttttctttttcttttt

SEQ ID NO: 69630 - DNA, 22 bp, Artificial Sequence
  chemically synthesized
tttctttttctttttctttttt

SEQ ID NO: 69631 - DNA, 22 bp, Artificial Sequence
  chemically synthesized
ttctttttctttttcttttttc

SEQ ID NO: 69632 - DNA, 22 bp, Artificial Sequence
  chemically synthesized
tctttttctttttcttttttct

SEQ ID NO: 69633 - DNA, 22 bp, Artificial Sequence
  chemically synthesized
ctttttctttttcttttttctt

SEQ ID NO: 69634 - DNA, 22 bp, Artificial Sequence
  chemically synthesized
tttttctttttcttttttcttt

SEQ ID NO: 69635 - DNA, 22 bp, Artificial Sequence
  chemically synthesized
tttctttttcttttttcttttt

SEQ ID NO: 69636 - DNA, 22 bp, Artificial Sequence
  chemically synthesized
ttctttttcttttttctttttc

SEQ ID NO: 69637 - DNA, 22 bp, Artificial Sequence
  chemically synthesized
tctttttcttttttctttttcc

SEQ ID NO: 69638 - DNA, 22 bp, Artificial Sequence
  chemically synthesized
ctttttcttttttctttttcct

SEQ ID NO: 69639 - DNA, 22 bp, Artificial Sequence
  chemically synthesized
tttttcttttttctttttcctt

SEQ ID NO: 69640 - DNA, 22 bp, Artificial Sequence
  chemically synthesized
tttcttttttctttttcctttt

SEQ ID NO: 69641 - DNA, 22 bp, Artificial Sequence
  chemically synthesized
ttcttttttctttttccttttt

SEQ ID NO: 69642 - DNA, 22 bp, Artificial Sequence
  chemically synthesized
tcttttttctttttcctttttt

SEQ ID NO: 69643 - DNA, 22 bp, Artificial Sequence
  chemically synthesized
cttttttctttttccttttttt

SEQ ID NO: 69644 - DNA, 22 bp, Artificial Sequence
  chemically synthesized
ttttttctttttcctttttttt

SEQ ID NO: 69645 - DNA, 22 bp, Artificial Sequence
  chemically synthesized
ttttctttttcctttttttttt

SEQ ID NO: 69646 - DNA, 22 bp, Artificial Sequence
  chemically synthesized
tttctttttccttttttttttt

SEQ ID NO: 69647 - DNA, 22 bp, Artificial Sequence
  chemically synthesized
ttctttttcctttttttttttt

SEQ ID NO: 69648 - DNA, 22 bp, Artificial Sequence
  chemically synthesized
tctttttccttttttttttttt

SEQ ID NO: 69649 - DNA, 22 bp, Artificial Sequence
  chemically synthesized
ctttttcctttttttttttttt

SEQ ID NO: 69650 - DNA, 22 bp, Artificial Sequence
  chemically synthesized
tttttccttttttttttttttc

SEQ ID NO: 69651 - DNA, 22 bp, Artificial Sequence
  chemically synthesized
tttccttttttttttttttcct

SEQ ID NO: 69652 - DNA, 22 bp, Artificial Sequence
  chemically synthesized
ttccttttttttttttttcctt

SEQ ID NO: 69653 - DNA, 22 bp, Artificial Sequence
  chemically synthesized
tccttttttttttttttccttt

SEQ ID NO: 69654 - DNA, 22 bp, Artificial Sequence
  chemically synthesized
ccttttttttttttttccttta

SEQ ID NO: 69655 - DNA, 22 bp, Artificial Sequence
  chemically synthesized
cttttttttttttttcctttat

SEQ ID NO: 69656 - DNA, 22 bp, Artificial Sequence
  chemically synthesized
ttttttttttttcctttatgtt

SEQ ID NO: 69657 - DNA, 22 bp, Artificial Sequence
  chemically synthesized
tttttttttttcctttatgttc

SEQ ID NO: 69658 - DNA, 22 bp, Artificial Sequence
  chemically synthesized
ttttttttttcctttatgttct

SEQ ID NO: 69659 - DNA, 22 bp, Artificial Sequence
  chemically synthesized
tttttttttcctttatgttctc

SEQ ID NO: 69660 - DNA, 22 bp, Artificial Sequence
  chemically synthesized
ttttttttcctttatgttctca

SEQ ID NO: 69661 - DNA, 22 bp, Artificial Sequence
  chemically synthesized
tttttttcctttatgttctcac

SEQ ID NO: 69662 - DNA, 22 bp, Artificial Sequence
  chemically synthesized
ttttttcctttatgttctcacc

SEQ ID NO: 69663 - DNA, 22 bp, Artificial Sequence
  chemically synthesized
tttttcctttatgttctcaccg

SEQ ID NO: 69664 - DNA, 22 bp, Artificial Sequence
  chemically synthesized
ttttcctttatgttctcaccgt

SEQ ID NO: 69665 - DNA, 22 bp, Artificial Sequence
  chemically synthesized
tttcctttatgttctcaccgtt

SEQ ID NO: 69666 - DNA, 22 bp, Artificial Sequence
  chemically synthesized
ttcctttatgttctcaccgttt

SEQ ID NO: 69667 - DNA, 22 bp, Artificial Sequence
  chemically synthesized
tcctttatgttctcaccgtttg

SEQ ID NO: 69668 - DNA, 22 bp, Artificial Sequence
  chemically synthesized
cctttatgttctcaccgtttga

SEQ ID NO: 69669 - DNA, 22 bp, Artificial Sequence
  chemically synthesized
ctttatgttctcaccgtttgaa

SEQ ID NO: 69670 - DNA, 22 bp, Artificial Sequence
  chemically synthesized
tatgttctcaccgtttgaatgc

SEQ ID NO: 69671 - DNA, 22 bp, Artificial Sequence
  chemically synthesized
atgttctcaccgtttgaatgca

SEQ ID NO: 69672 - DNA, 22 bp, Artificial Sequence
  chemically synthesized
tgttctcaccgtttgaatgcat

SEQ ID NO: 69673 - DNA, 22 bp, Artificial Sequence
  chemically synthesized
tcaccgtttgaatgcatgatct

SEQ ID NO: 69674 - DNA, 22 bp, Artificial Sequence
  chemically synthesized
accgtttgaatgcatgatctgt

SEQ ID NO: 69675 - DNA, 22 bp, Artificial Sequence
  chemically synthesized
gaatgcatgatctgtatggggc

SEQ ID NO: 69676 - DNA, 22 bp, Artificial Sequence
  chemically synthesized
aatgcatgatctgtatggggca

SEQ ID NO: 69677 - DNA, 22 bp, Artificial Sequence
  chemically synthesized
tatggggcaatactattgcatt

SEQ ID NO: 69678 - DNA, 22 bp, Artificial Sequence
  chemically synthesized
ttgcattttacgcaaactttga

SEQ ID NO: 69679 - DNA, 22 bp, Artificial Sequence
  chemically synthesized
cattttacgcaaactttgagcc

SEQ ID NO: 69680 - DNA, 22 bp, Artificial Sequence
  chemically synthesized
tacgcaaactttgagcctttct

SEQ ID NO: 69681 - DNA, 22 bp, Artificial Sequence
  chemically synthesized
acgcaaactttgagcctttctc

SEQ ID NO: 69682 - DNA, 22 bp, Artificial Sequence
  chemically synthesized
cgcaaactttgagcctttctct

SEQ ID NO: 69683 - DNA, 22 bp, Artificial Sequence
  chemically synthesized
tgagcctttctcttgtgcaata

SEQ ID NO: 69684 - DNA, 22 bp, Artificial Sequence
  chemically synthesized
gagcctttctcttgtgcaataa

SEQ ID NO: 69685 - DNA, 22 bp, Artificial Sequence
  chemically synthesized
agcctttctcttgtgcaataat

SEQ ID NO: 69686 - DNA, 22 bp, Artificial Sequence
  chemically synthesized
tctcttgtgcaataatttacat

SEQ ID NO: 69687 - DNA, 22 bp, Artificial Sequence
  chemically synthesized
ctcttgtgcaataatttacatg

SEQ ID NO: 69688 - DNA, 22 bp, Artificial Sequence
  chemically synthesized
tcttgtgcaataatttacatgt

SEQ ID NO: 69689 - DNA, 22 bp, Artificial Sequence
  chemically synthesized
ttgtgcaataatttacatgttg

SEQ ID NO: 69690 - DNA, 22 bp, Artificial Sequence
  chemically synthesized
gtgcaataatttacatgttgtg

SEQ ID NO: 69691 - DNA, 22 bp, Artificial Sequence
  chemically synthesized
tgcaataatttacatgttgtgt

SEQ ID NO: 69692 - DNA, 22 bp, Artificial Sequence
  chemically synthesized
acatgttgtgtatgtttttttt

SEQ ID NO: 69693 - DNA, 22 bp, Artificial Sequence
  chemically synthesized
catgttgtgtatgttttttttt

SEQ ID NO: 69694 - DNA, 22 bp, Artificial Sequence
  chemically synthesized
tgtatgtttttttttaaactta

SEQ ID NO: 69695 - DNA, 22 bp, Artificial Sequence
  chemically synthesized
ttttttaaacttagacagcatg

SEQ ID NO: 69696 - DNA, 22 bp, Artificial Sequence
  chemically synthesized
tttttaaacttagacagcatgt

SEQ ID NO: 69697 - DNA, 22 bp, Artificial Sequence
  chemically synthesized
ttttaaacttagacagcatgta

SEQ ID NO: 69698 - DNA, 22 bp, Artificial Sequence
  chemically synthesized
tttaaacttagacagcatgtat

SEQ ID NO: 69699 - DNA, 22 bp, Artificial Sequence
  chemically synthesized
ttaaacttagacagcatgtatg

SEQ ID NO: 69700 - DNA, 22 bp, Artificial Sequence
  chemically synthesized
taaacttagacagcatgtatgg

SEQ ID NO: 69701 - DNA, 22 bp, Artificial Sequence
  chemically synthesized
aaacttagacagcatgtatggt

SEQ ID NO: 69702 - DNA, 22 bp, Artificial Sequence
  chemically synthesized
aacttagacagcatgtatggta

SEQ ID NO: 69703 - DNA, 22 bp, Artificial Sequence
  chemically synthesized
agacagcatgtatggtatgtta

SEQ ID NO: 69704 - DNA, 22 bp, Artificial Sequence
  chemically synthesized
gacagcatgtatggtatgttat

SEQ ID NO: 69705 - DNA, 22 bp, Artificial Sequence
  chemically synthesized
tggctattttaaattgtcccta

SEQ ID NO: 69706 - DNA, 22 bp, Artificial Sequence
  chemically synthesized
ttttaaattgtccctaattcgt

SEQ ID NO: 69707 - DNA, 22 bp, Artificial Sequence
  chemically synthesized
taaattgtccctaattcgttgc

SEQ ID NO: 69708 - DNA, 22 bp, Artificial Sequence
  chemically synthesized
aaattgtccctaattcgttgct

SEQ ID NO: 69709 - DNA, 22 bp, Artificial Sequence
  chemically synthesized
aattgtccctaattcgttgctg

SEQ ID NO: 69710 - DNA, 22 bp, Artificial Sequence
  chemically synthesized
tccctaattcgttgctgagcaa

SEQ ID NO: 69711 - DNA, 22 bp, Artificial Sequence
  chemically synthesized
attcgttgctgagcaaacatgt

SEQ ID NO: 69712 - DNA, 22 bp, Artificial Sequence
  chemically synthesized
gttgctgagcaaacatgttgct

SEQ ID NO: 69713 - DNA, 22 bp, Artificial Sequence
  chemically synthesized
ctgagcaaacatgttgctgttt

SEQ ID NO: 69714 - DNA, 22 bp, Artificial Sequence
  chemically synthesized
agcaaacatgttgctgtttcca

SEQ ID NO: 69715 - DNA, 22 bp, Artificial Sequence
  chemically synthesized
ctgtttccagttccgttctgag

SEQ ID NO: 69716 - DNA, 22 bp, Artificial Sequence
  chemically synthesized
tttccagttccgttctgagaga

SEQ ID NO: 69717 - DNA, 22 bp, Artificial Sequence
  chemically synthesized
ccagttccgttctgagagaaaa

SEQ ID NO: 69718 - DNA, 22 bp, Artificial Sequence
  chemically synthesized
cagttccgttctgagagaaaaa

SEQ ID NO: 69719 - DNA, 22 bp, Artificial Sequence
  chemically synthesized
cgttctgagagaaaaagagaga

SEQ ID NO: 69720 - DNA, 22 bp, Artificial Sequence
  chemically synthesized
tgagagaaaaagagagagagag

SEQ ID NO: 69721 - DNA, 22 bp, Artificial Sequence
  chemically synthesized
agagaaaaagagagagagagag

SEQ ID NO: 69722 - DNA, 22 bp, Artificial Sequence
  chemically synthesized
catacattctgtaatacatatc

SEQ ID NO: 69723 - DNA, 22 bp, Artificial Sequence
  chemically synthesized
tgtaatacatatcatgtacagt

SEQ ID NO: 69724 - DNA, 22 bp, Artificial Sequence
  chemically synthesized
taatacatatcatgtacagttt

SEQ ID NO: 69725 - DNA, 22 bp, Artificial Sequence
  chemically synthesized
tattttataacgtgaggaggaa

SEQ ID NO: 69726 - DNA, 22 bp, Artificial Sequence
  chemically synthesized
attttataacgtgaggaggaaa

SEQ ID NO: 69727 - DNA, 22 bp, Artificial Sequence
  chemically synthesized
ttttataacgtgaggaggaaaa

SEQ ID NO: 69728 - DNA, 22 bp, Artificial Sequence
  chemically synthesized
tataacgtgaggaggaaaaaca

SEQ ID NO: 69729 - DNA, 22 bp, Artificial Sequence
  chemically synthesized
ataacgtgaggaggaaaaacag

SEQ ID NO: 69730 - DNA, 22 bp, Artificial Sequence
  chemically synthesized
taacgtgaggaggaaaaacagt

SEQ ID NO: 69731 - DNA, 22 bp, Artificial Sequence
  chemically synthesized
tggattaaccctctatagacag

SEQ ID NO: 69732 - DNA, 22 bp, Artificial Sequence
  chemically synthesized
ggattaaccctctatagacaga

SEQ ID NO: 69733 - DNA, 22 bp, Artificial Sequence
  chemically synthesized
gattaaccctctatagacagaa

SEQ ID NO: 69734 - DNA, 22 bp, Artificial Sequence
  chemically synthesized
accctctatagacagaatagat

SEQ ID NO: 69735 - DNA, 22 bp, Artificial Sequence
  chemically synthesized
tatagacagaatagatagcact

SEQ ID NO: 69736 - DNA, 22 bp, Artificial Sequence
  chemically synthesized
tagacagaatagatagcactga

SEQ ID NO: 69737 - DNA, 22 bp, Artificial Sequence
  chemically synthesized
aaaaaaaatctctatgagctaa

SEQ ID NO: 69738 - DNA, 22 bp, Artificial Sequence
  chemically synthesized
tatgagctaaatgtctgtctct

SEQ ID NO: 69739 - DNA, 22 bp, Artificial Sequence
  chemically synthesized
tgagctaaatgtctgtctctaa

SEQ ID NO: 69740 - DNA, 22 bp, Artificial Sequence
  chemically synthesized
aatgtctgtctctaaagggtta

SEQ ID NO: 69741 - DNA, 22 bp, Artificial Sequence
  chemically synthesized
tctctaaagggttaaatgtatc

SEQ ID NO: 69742 - DNA, 22 bp, Artificial Sequence
  chemically synthesized
taaagggttaaatgtatcaatt

SEQ ID NO: 69743 - DNA, 22 bp, Artificial Sequence
  chemically synthesized
aagggttaaatgtatcaattgg

SEQ ID NO: 69744 - DNA, 22 bp, Artificial Sequence
  chemically synthesized
aatgtatcaattggaaaggaag

SEQ ID NO: 69745 - DNA, 22 bp, Artificial Sequence
  chemically synthesized
gaaaggaagaaaaaaggccttg

SEQ ID NO: 69746 - DNA, 22 bp, Artificial Sequence
  chemically synthesized
gaattgacaaattaacagaaaa

SEQ ID NO: 69747 - DNA, 22 bp, Artificial Sequence
  chemically synthesized
aattgacaaattaacagaaaaa

SEQ ID NO: 69748 - DNA, 22 bp, Artificial Sequence
  chemically synthesized
acaaattaacagaaaaacagaa

SEQ ID NO: 69749 - DNA, 22 bp, Artificial Sequence
  chemically synthesized
acagaaaaacagaacaagttta

SEQ ID NO: 69750 - DNA, 22 bp, Artificial Sequence
  chemically synthesized
attctatcatttggttttaaaa

SEQ ID NO: 69751 - DNA, 22 bp, Artificial Sequence
  chemically synthesized
ttctatcatttggttttaaaat

SEQ ID NO: 69752 - DNA, 22 bp, Artificial Sequence
  chemically synthesized
tatcatttggttttaaaatatg

SEQ ID NO: 69753 - DNA, 22 bp, Artificial Sequence
  chemically synthesized
tcatttggttttaaaatatgag

SEQ ID NO: 69754 - DNA, 22 bp, Artificial Sequence
  chemically synthesized
ggttttaaaatatgagtgcctt

SEQ ID NO: 69755 - DNA, 22 bp, Artificial Sequence
  chemically synthesized
gttttaaaatatgagtgccttg

SEQ ID NO: 69756 - DNA, 22 bp, Artificial Sequence
  chemically synthesized
taaaatatgagtgccttggatc

SEQ ID NO: 69757 - DNA, 22 bp, Artificial Sequence
  chemically synthesized
aaaatatgagtgccttggatct

SEQ ID NO: 69758 - DNA, 22 bp, Artificial Sequence
  chemically synthesized
aaatatgagtgccttggatcta

SEQ ID NO: 69759 - DNA, 22 bp, Artificial Sequence
  chemically synthesized
ggatctattaaaaccacatcga

SEQ ID NO: 69760 - DNA, 22 bp, Artificial Sequence
  chemically synthesized
gatctattaaaaccacatcgat

SEQ ID NO: 69761 - DNA, 22 bp, Artificial Sequence
  chemically synthesized
ttaaaaccacatcgatggttct

SEQ ID NO: 69762 - DNA, 22 bp, Artificial Sequence
  chemically synthesized
aaaccacatcgatggttctttc

SEQ ID NO: 69763 - DNA, 22 bp, Artificial Sequence
  chemically synthesized
tttctacttgttataaacttgt

SEQ ID NO: 69764 - DNA, 22 bp, Artificial Sequence
  chemically synthesized
tctacttgttataaacttgtag

SEQ ID NO: 69765 - DNA, 22 bp, Artificial Sequence
  chemically synthesized
ctacttgttataaacttgtagc

SEQ ID NO: 69766 - DNA, 22 bp, Artificial Sequence
  chemically synthesized
tacttgttataaacttgtagct

SEQ ID NO: 69767 - DNA, 22 bp, Artificial Sequence
  chemically synthesized
cttgttataaacttgtagctta

SEQ ID NO: 69768 - DNA, 22 bp, Artificial Sequence
  chemically synthesized
gttataaacttgtagcttaatt

SEQ ID NO: 69769 - DNA, 22 bp, Artificial Sequence
  chemically synthesized
ttataaacttgtagcttaattc

SEQ ID NO: 69770 - DNA, 22 bp, Artificial Sequence
  chemically synthesized
taaacttgtagcttaattcagc

SEQ ID NO: 69771 - DNA, 22 bp, Artificial Sequence
  chemically synthesized
gtagcttaattcagcattgggt

SEQ ID NO: 69772 - DNA, 22 bp, Artificial Sequence
  chemically synthesized
tagcttaattcagcattgggtg

SEQ ID NO: 69773 - DNA, 22 bp, Artificial Sequence
  chemically synthesized
aattcagcattgggtgaggtaa

SEQ ID NO: 69774 - DNA, 22 bp, Artificial Sequence
  chemically synthesized
attcagcattgggtgaggtaat

SEQ ID NO: 69775 - DNA, 22 bp, Artificial Sequence
  chemically synthesized
agcattgggtgaggtaataaac

SEQ ID NO: 69776 - DNA, 22 bp, Artificial Sequence
  chemically synthesized
ggtgaggtaataaaccttagga

SEQ ID NO: 69777 - DNA, 22 bp, Artificial Sequence
  chemically synthesized
aggaactagcatataattctat

SEQ ID NO: 69778 - DNA, 22 bp, Artificial Sequence
  chemically synthesized
ggaactagcatataattctata

SEQ ID NO: 69779 - DNA, 22 bp, Artificial Sequence
  chemically synthesized
gcatataattctatattgtatt

SEQ ID NO: 69780 - DNA, 22 bp, Artificial Sequence
  chemically synthesized
tatattgtatttctcacaacaa

SEQ ID NO: 69781 - DNA, 22 bp, Artificial Sequence
  chemically synthesized
tattgtatttctcacaacaatg

SEQ ID NO: 69782 - DNA, 22 bp, Artificial Sequence
  chemically synthesized
tatttctcacaacaatggctac

SEQ ID NO: 69783 - DNA, 22 bp, Artificial Sequence
  chemically synthesized
ctcacaacaatggctacctaaa

SEQ ID NO: 69784 - DNA, 22 bp, Artificial Sequence
  chemically synthesized
tcacaacaatggctacctaaaa

SEQ ID NO: 69785 - DNA, 22 bp, Artificial Sequence
  chemically synthesized
acaacaatggctacctaaaaag

SEQ ID NO: 69786 - DNA, 22 bp, Artificial Sequence
  chemically synthesized
cctaaaaagatgacccattatg

SEQ ID NO: 69787 - DNA, 22 bp, Artificial Sequence
  chemically synthesized
aaaagatgacccattatgtcct

SEQ ID NO: 69788 - DNA, 22 bp, Artificial Sequence
  chemically synthesized
tgtcctagttaatcatcatttt

SEQ ID NO: 69789 - DNA, 22 bp, Artificial Sequence
  chemically synthesized
gttaatcatcatttttccttta

SEQ ID NO: 69790 - DNA, 22 bp, Artificial Sequence
  chemically synthesized
atcatcatttttcctttagttt

SEQ ID NO: 69791 - DNA, 22 bp, Artificial Sequence
  chemically synthesized
ttcctttagtttaattttataa

SEQ ID NO: 69792 - DNA, 22 bp, Artificial Sequence
  chemically synthesized
tcctttagtttaattttataaa

SEQ ID NO: 69793 - DNA, 22 bp, Artificial Sequence
  chemically synthesized
cctttagtttaattttataaac

SEQ ID NO: 69794 - DNA, 22 bp, Artificial Sequence
  chemically synthesized
ctttagtttaattttataaaca

SEQ ID NO: 69795 - DNA, 22 bp, Artificial Sequence
  chemically synthesized
tagtttaattttataaacaaaa

SEQ ID NO: 69796 - DNA, 22 bp, Artificial Sequence
  chemically synthesized
agtttaattttataaacaaaac

SEQ ID NO: 69797 - DNA, 22 bp, Artificial Sequence
  chemically synthesized
gtttaattttataaacaaaact

SEQ ID NO: 69798 - DNA, 22 bp, Artificial Sequence
  chemically synthesized
aattttataaacaaaactgatt

SEQ ID NO: 69799 - DNA, 22 bp, Artificial Sequence
  chemically synthesized
attttataaacaaaactgatta

SEQ ID NO: 69800 - DNA, 22 bp, Artificial Sequence
  chemically synthesized
tataaacaaaactgattatacc

SEQ ID NO: 69801 - DNA, 22 bp, Artificial Sequence
  chemically synthesized
ataaacaaaactgattatacca

SEQ ID NO: 69802 - DNA, 22 bp, Artificial Sequence
  chemically synthesized
taaacaaaactgattataccag

SEQ ID NO: 69803 - DNA, 22 bp, Artificial Sequence
  chemically synthesized
attataccagtataaaagctac

SEQ ID NO: 69804 - DNA, 22 bp, Artificial Sequence
  chemically synthesized
taccagtataaaagctactttg

SEQ ID NO: 69805 - DNA, 22 bp, Artificial Sequence
  chemically synthesized
ctttgctcctggtgagagctta

SEQ ID NO: 69806 - DNA, 22 bp, Artificial Sequence
  chemically synthesized
tgctcctggtgagagcttaaaa

SEQ ID NO: 69807 - DNA, 22 bp, Artificial Sequence
  chemically synthesized
gctcctggtgagagcttaaaag

SEQ ID NO: 69808 - DNA, 22 bp, Artificial Sequence
  chemically synthesized
ctcctggtgagagcttaaaaga

SEQ ID NO: 69809 - DNA, 22 bp, Artificial Sequence
  chemically synthesized
ctggtgagagcttaaaagaaat

SEQ ID NO: 69810 - DNA, 22 bp, Artificial Sequence
  chemically synthesized
gtgagagcttaaaagaaatggg

SEQ ID NO: 69811 - DNA, 22 bp, Artificial Sequence
  chemically synthesized
aaaagaaatgggctgttttgcc

SEQ ID NO: 69812 - DNA, 22 bp, Artificial Sequence
  chemically synthesized
aaagaaatgggctgttttgccc

SEQ ID NO: 69813 - DNA, 22 bp, Artificial Sequence
  chemically synthesized
ttttgcccaaagttttattttt

SEQ ID NO: 69814 - DNA, 22 bp, Artificial Sequence
  chemically synthesized
tgcccaaagttttatttttttt

SEQ ID NO: 69815 - DNA, 22 bp, Artificial Sequence
  chemically synthesized
gcccaaagttttatttttttta

SEQ ID NO: 69816 - DNA, 22 bp, Artificial Sequence
  chemically synthesized
cccaaagttttattttttttaa

SEQ ID NO: 69817 - DNA, 22 bp, Artificial Sequence
  chemically synthesized
tattttttttaaacaatgatta

SEQ ID NO: 69818 - DNA, 22 bp, Artificial Sequence
  chemically synthesized
attttttttaaacaatgattaa

SEQ ID NO: 69819 - DNA, 22 bp, Artificial Sequence
  chemically synthesized
ttttttttaaacaatgattaaa

SEQ ID NO: 69820 - DNA, 22 bp, Artificial Sequence
  chemically synthesized
tttttaaacaatgattaaattg

SEQ ID NO: 69821 - DNA, 22 bp, Artificial Sequence
  chemically synthesized
ttttaaacaatgattaaattga

SEQ ID NO: 69822 - DNA, 22 bp, Artificial Sequence
  chemically synthesized
tttaaacaatgattaaattgaa

SEQ ID NO: 69823 - DNA, 22 bp, Artificial Sequence
  chemically synthesized
ttaaacaatgattaaattgaat

SEQ ID NO: 69824 - DNA, 22 bp, Artificial Sequence
  chemically synthesized
taaacaatgattaaattgaatg

SEQ ID NO: 69825 - DNA, 22 bp, Artificial Sequence
  chemically synthesized
aaacaatgattaaattgaatgt

SEQ ID NO: 69826 - DNA, 22 bp, Artificial Sequence
  chemically synthesized
aacaatgattaaattgaatgtg

SEQ ID NO: 69827 - DNA, 22 bp, Artificial Sequence
  chemically synthesized
aattgaatgtgtaatgtgcaaa

SEQ ID NO: 69828 - DNA, 22 bp, Artificial Sequence
  chemically synthesized
aatgtgtaatgtgcaaaagccc

SEQ ID NO: 69829 - DNA, 22 bp, Artificial Sequence
  chemically synthesized
gaacgcaattaaatacactagt

SEQ ID NO: 69830 - DNA, 22 bp, Artificial Sequence
  chemically synthesized
aatacactagtaaggagttcat

SEQ ID NO: 69831 - DNA, 22 bp, Artificial Sequence
  chemically synthesized
gtaaggagttcattttatgaag

SEQ ID NO: 69832 - DNA, 22 bp, Artificial Sequence
  chemically synthesized
attttatgaagatatttgcttt

SEQ ID NO: 69833 - DNA, 22 bp, Artificial Sequence
  chemically synthesized
tatgaagatatttgctttaata

SEQ ID NO: 69834 - DNA, 22 bp, Artificial Sequence
  chemically synthesized
atgaagatatttgctttaataa

SEQ ID NO: 69835 - DNA, 22 bp, Artificial Sequence
  chemically synthesized
tgaagatatttgctttaataat

SEQ ID NO: 69836 - DNA, 22 bp, Artificial Sequence
  chemically synthesized
gctttaataatgtctttttaaa

SEQ ID NO: 69837 - DNA, 22 bp, Artificial Sequence
  chemically synthesized
ctttaataatgtctttttaaaa

SEQ ID NO: 69838 - DNA, 22 bp, Artificial Sequence
  chemically synthesized
taataatgtctttttaaaaata

SEQ ID NO: 69839 - DNA, 22 bp, Artificial Sequence
  chemically synthesized
aataatgtctttttaaaaatac

SEQ ID NO: 69840 - DNA, 22 bp, Artificial Sequence
  chemically synthesized
ataatgtctttttaaaaatact

SEQ ID NO: 69841 - DNA, 22 bp, Artificial Sequence
  chemically synthesized
tttaaaaatactggcaccaaaa

SEQ ID NO: 69842 - DNA, 22 bp, Artificial Sequence
  chemically synthesized
ttaaaaatactggcaccaaaag

SEQ ID NO: 69843 - DNA, 22 bp, Artificial Sequence
  chemically synthesized
taaaaatactggcaccaaaaga

SEQ ID NO: 69844 - DNA, 22 bp, Artificial Sequence
  chemically synthesized
aaaaatactggcaccaaaagaa

SEQ ID NO: 69845 - DNA, 22 bp, Artificial Sequence
  chemically synthesized
aaaatactggcaccaaaagaaa

SEQ ID NO: 69846 - DNA, 22 bp, Artificial Sequence
  chemically synthesized
gcaccaaaagaaatagatccag

SEQ ID NO: 69847 - DNA, 22 bp, Artificial Sequence
  chemically synthesized
cttggttgtcaagtggacaatc

SEQ ID NO: 69848 - DNA, 22 bp, Artificial Sequence
  chemically synthesized
ggttgtcaagtggacaatcaaa

SEQ ID NO: 69849 - DNA, 22 bp, Artificial Sequence
  chemically synthesized
gttgtcaagtggacaatcaaat

SEQ ID NO: 69850 - DNA, 22 bp, Artificial Sequence
  chemically synthesized
tcaagtggacaatcaaatgata

SEQ ID NO: 69851 - DNA, 22 bp, Artificial Sequence
  chemically synthesized
taagaccttgtataccatattg

SEQ ID NO: 69852 - DNA, 22 bp, Artificial Sequence
  chemically synthesized
aagaccttgtataccatattga

SEQ ID NO: 69853 - DNA, 22 bp, Artificial Sequence
  chemically synthesized
agaccttgtataccatattgaa

SEQ ID NO: 69854 - DNA, 22 bp, Artificial Sequence
  chemically synthesized
gtataccatattgaaaggaaga

SEQ ID NO: 69855 - DNA, 22 bp, Artificial Sequence
  chemically synthesized
tataccatattgaaaggaagag

SEQ ID NO: 69856 - DNA, 22 bp, Artificial Sequence
  chemically synthesized
aaaggaagaggctgacaataag

SEQ ID NO: 69857 - DNA, 22 bp, Artificial Sequence
  chemically synthesized
acaataaggtttgacagagggg

SEQ ID NO: 69858 - DNA, 22 bp, Artificial Sequence
  chemically synthesized
gacagaggggaacagaagaaaa

SEQ ID NO: 69859 - DNA, 22 bp, Artificial Sequence
  chemically synthesized
acagaggggaacagaagaaaat

SEQ ID NO: 69860 - DNA, 22 bp, Artificial Sequence
  chemically synthesized
attagcacaacgtggtactatt

SEQ ID NO: 69861 - DNA, 22 bp, Artificial Sequence
  chemically synthesized
ttagcacaacgtggtactattt

SEQ ID NO: 69862 - DNA, 22 bp, Artificial Sequence
  chemically synthesized
gcacaacgtggtactatttgcc

SEQ ID NO: 69863 - DNA, 22 bp, Artificial Sequence
  chemically synthesized
tttgccatttaaaactagaaca

SEQ ID NO: 69864 - DNA, 22 bp, Artificial Sequence
  chemically synthesized
gccatttaaaactagaacaggt

SEQ ID NO: 69865 - DNA, 22 bp, Artificial Sequence
  chemically synthesized
ccatttaaaactagaacaggta

SEQ ID NO: 69866 - DNA, 22 bp, Artificial Sequence
  chemically synthesized
aaaactagaacaggtatataag

SEQ ID NO: 69867 - DNA, 22 bp, Artificial Sequence
  chemically synthesized
aaactagaacaggtatataagc

SEQ ID NO: 69868 - DNA, 22 bp, Artificial Sequence
  chemically synthesized
gaacaggtatataagctaatat

SEQ ID NO: 69869 - DNA, 22 bp, Artificial Sequence
  chemically synthesized
atattgatacaatgatgattaa

SEQ ID NO: 69870 - DNA, 22 bp, Artificial Sequence
  chemically synthesized
atacaatgatgattaactatga

SEQ ID NO: 69871 - DNA, 22 bp, Artificial Sequence
  chemically synthesized
actatgaattcttaagacttgc

SEQ ID NO: 69872 - DNA, 22 bp, Artificial Sequence
  chemically synthesized
tgaattcttaagacttgcattt

SEQ ID NO: 69873 - DNA, 22 bp, Artificial Sequence
  chemically synthesized
ttaagacttgcatttaaatgtg

SEQ ID NO: 69874 - DNA, 22 bp, Artificial Sequence
  chemically synthesized
aagacttgcatttaaatgtgac

SEQ ID NO: 69875 - DNA, 22 bp, Artificial Sequence
  chemically synthesized
agacttgcatttaaatgtgaca

SEQ ID NO: 69876 - DNA, 22 bp, Artificial Sequence
  chemically synthesized
gcatttaaatgtgacattctta

SEQ ID NO: 69877 - DNA, 22 bp, Artificial Sequence
  chemically synthesized
catttaaatgtgacattcttaa

SEQ ID NO: 69878 - DNA, 22 bp, Artificial Sequence
  chemically synthesized
aaatgtgacattcttaaaaaaa

SEQ ID NO: 69879 - DNA, 22 bp, Artificial Sequence
  chemically synthesized
aatgtgacattcttaaaaaaag

SEQ ID NO: 69880 - DNA, 22 bp, Artificial Sequence
  chemically synthesized
ttaaaaaaagaagagaaagaat

SEQ ID NO: 69881 - DNA, 22 bp, Artificial Sequence
  chemically synthesized
aaaaaaagaagagaaagaattt

SEQ ID NO: 69882 - DNA, 22 bp, Artificial Sequence
  chemically synthesized
aaaaaagaagagaaagaatttt

SEQ ID NO: 69883 - DNA, 22 bp, Artificial Sequence
  chemically synthesized
taagagtagcagtatatatgtc

SEQ ID NO: 69884 - DNA, 22 bp, Artificial Sequence
  chemically synthesized
aagagtagcagtatatatgtct

SEQ ID NO: 69885 - DNA, 22 bp, Artificial Sequence
  chemically synthesized
agagtagcagtatatatgtctg

SEQ ID NO: 69886 - DNA, 22 bp, Artificial Sequence
  chemically synthesized
tgctccctaaaagttgtacttc

SEQ ID NO: 69887 - DNA, 22 bp, Artificial Sequence
  chemically synthesized
cctaaaagttgtacttcatttc

SEQ ID NO: 69888 - DNA, 22 bp, Artificial Sequence
  chemically synthesized
aaagttgtacttcatttctttt

SEQ ID NO: 69889 - DNA, 22 bp, Artificial Sequence
  chemically synthesized
tacttcatttcttttccataca

SEQ ID NO: 69890 - DNA, 22 bp, Artificial Sequence
  chemically synthesized
catttcttttccatacactgtg

SEQ ID NO: 69891 - DNA, 22 bp, Artificial Sequence
  chemically synthesized
atttcttttccatacactgtgt

SEQ ID NO: 69892 - DNA, 22 bp, Artificial Sequence
  chemically synthesized
cttttccatacactgtgtgcta

SEQ ID NO: 69893 - DNA, 22 bp, Artificial Sequence
  chemically synthesized
ttttccatacactgtgtgctat

SEQ ID NO: 69894 - DNA, 22 bp, Artificial Sequence
  chemically synthesized
ttccatacactgtgtgctattt

SEQ ID NO: 69895 - DNA, 22 bp, Artificial Sequence
  chemically synthesized
tccatacactgtgtgctatttg

SEQ ID NO: 69896 - DNA, 22 bp, Artificial Sequence
  chemically synthesized
ccatacactgtgtgctatttgt

SEQ ID NO: 69897 - DNA, 22 bp, Artificial Sequence
  chemically synthesized
catacactgtgtgctatttgtg

SEQ ID NO: 69898 - DNA, 22 bp, Artificial Sequence
  chemically synthesized
tgtgctatttgtgttaacatgg

SEQ ID NO: 69899 - DNA, 22 bp, Artificial Sequence
  chemically synthesized
tttgtgttaacatggaagagga

SEQ ID NO: 69900 - DNA, 22 bp, Artificial Sequence
  chemically synthesized
gtgttaacatggaagaggattc

SEQ ID NO: 69901 - DNA, 22 bp, Artificial Sequence
  chemically synthesized
tgttaacatggaagaggattca

SEQ ID NO: 69902 - DNA, 22 bp, Artificial Sequence
  chemically synthesized
acatggaagaggattcattgtt

SEQ ID NO: 69903 - DNA, 22 bp, Artificial Sequence
  chemically synthesized
attgtttttatttttatttttt

SEQ ID NO: 69904 - DNA, 22 bp, Artificial Sequence
  chemically synthesized
tttttatttttatttttttaat

SEQ ID NO: 69905 - DNA, 22 bp, Artificial Sequence
  chemically synthesized
ttatttttatttttttaatttt

SEQ ID NO: 69906 - DNA, 22 bp, Artificial Sequence
  chemically synthesized
tatttttatttttttaattttt

SEQ ID NO: 69907 - DNA, 22 bp, Artificial Sequence
  chemically synthesized
atttttatttttttaatttttt

SEQ ID NO: 69908 - DNA, 22 bp, Artificial Sequence
  chemically synthesized
tttttatttttttaattttttc

SEQ ID NO: 69909 - DNA, 22 bp, Artificial Sequence
  chemically synthesized
ttatttttttaattttttcttt

SEQ ID NO: 69910 - DNA, 22 bp, Artificial Sequence
  chemically synthesized
tatttttttaattttttctttt

SEQ ID NO: 69911 - DNA, 22 bp, Artificial Sequence
  chemically synthesized
atttttttaattttttcttttt

SEQ ID NO: 69912 - DNA, 22 bp, Artificial Sequence
  chemically synthesized
tttttttaattttttctttttt

SEQ ID NO: 69913 - DNA, 22 bp, Artificial Sequence
  chemically synthesized
ttttaattttttcttttttatt

SEQ ID NO: 69914 - DNA, 22 bp, Artificial Sequence
  chemically synthesized
tttaattttttcttttttatta

SEQ ID NO: 69915 - DNA, 22 bp, Artificial Sequence
  chemically synthesized
ttaattttttcttttttattaa

SEQ ID NO: 69916 - DNA, 22 bp, Artificial Sequence
  chemically synthesized
taattttttcttttttattaag

SEQ ID NO: 69917 - DNA, 22 bp, Artificial Sequence
  chemically synthesized
aattttttcttttttattaagc

SEQ ID NO: 69918 - DNA, 22 bp, Artificial Sequence
  chemically synthesized
attttttcttttttattaagct

SEQ ID NO: 69919 - DNA, 22 bp, Artificial Sequence
  chemically synthesized
tttcttttttattaagctagca

SEQ ID NO: 69920 - DNA, 22 bp, Artificial Sequence
  chemically synthesized
ttcttttttattaagctagcat

SEQ ID NO: 69921 - DNA, 22 bp, Artificial Sequence
  chemically synthesized
tcttttttattaagctagcatc

SEQ ID NO: 69922 - DNA, 22 bp, Artificial Sequence
  chemically synthesized
cttttttattaagctagcatct

SEQ ID NO: 69923 - DNA, 22 bp, Artificial Sequence
  chemically synthesized
ttttttattaagctagcatctg

SEQ ID NO: 69924 - DNA, 22 bp, Artificial Sequence
  chemically synthesized
ttttattaagctagcatctgcc

SEQ ID NO: 69925 - DNA, 22 bp, Artificial Sequence
  chemically synthesized
tttattaagctagcatctgccc

SEQ ID NO: 69926 - DNA, 22 bp, Artificial Sequence
  chemically synthesized
ttattaagctagcatctgcccc

SEQ ID NO: 69927 - DNA, 22 bp, Artificial Sequence
  chemically synthesized
tattaagctagcatctgcccca

SEQ ID NO: 69928 - DNA, 22 bp, Artificial Sequence
  chemically synthesized
attaagctagcatctgccccag

SEQ ID NO: 69929 - DNA, 22 bp, Artificial Sequence
  chemically synthesized
ttaagctagcatctgccccagt

SEQ ID NO: 69930 - DNA, 22 bp, Artificial Sequence
  chemically synthesized
agctagcatctgccccagttgg

SEQ ID NO: 69931 - DNA, 22 bp, Artificial Sequence
  chemically synthesized
gcatctgccccagttggtgttc

SEQ ID NO: 69932 - DNA, 22 bp, Artificial Sequence
  chemically synthesized
ccccagttggtgttcaaatagc

SEQ ID NO: 69933 - DNA, 22 bp, Artificial Sequence
  chemically synthesized
gtgttcaaatagcacttgactc

SEQ ID NO: 69934 - DNA, 22 bp, Artificial Sequence
  chemically synthesized
aaatagcacttgactctgcctg

SEQ ID NO: 69935 - DNA, 22 bp, Artificial Sequence
  chemically synthesized
gactctgcctgtgatatctgta

SEQ ID NO: 69936 - DNA, 22 bp, Artificial Sequence
  chemically synthesized
actctgcctgtgatatctgtat

SEQ ID NO: 69937 - DNA, 22 bp, Artificial Sequence
  chemically synthesized
tgcctgtgatatctgtatcttt

SEQ ID NO: 69938 - DNA, 22 bp, Artificial Sequence
  chemically synthesized
cctgtgatatctgtatcttttc

SEQ ID NO: 69939 - DNA, 22 bp, Artificial Sequence
  chemically synthesized
tgatatctgtatcttttctcta

SEQ ID NO: 69940 - DNA, 22 bp, Artificial Sequence
  chemically synthesized
tatcttttctctaatcagagat

SEQ ID NO: 69941 - DNA, 22 bp, Artificial Sequence
  chemically synthesized
ttctctaatcagagatacagag

SEQ ID NO: 69942 - DNA, 22 bp, Artificial Sequence
  chemically synthesized
tctctaatcagagatacagagg

SEQ ID NO: 69943 - DNA, 22 bp, Artificial Sequence
  chemically synthesized
ctctaatcagagatacagaggt

SEQ ID NO: 69944 - DNA, 22 bp, Artificial Sequence
  chemically synthesized
tctaatcagagatacagaggtt

SEQ ID NO: 69945 - DNA, 22 bp, Artificial Sequence
  chemically synthesized
taatcagagatacagaggttga

SEQ ID NO: 69946 - DNA, 22 bp, Artificial Sequence
  chemically synthesized
atcagagatacagaggttgagt

SEQ ID NO: 69947 - DNA, 22 bp, Artificial Sequence
  chemically synthesized
agtataaaataaacctgctcag

SEQ ID NO: 69948 - DNA, 22 bp, Artificial Sequence
  chemically synthesized
ctcagataggacaattaagtgc

SEQ ID NO: 69949 - DNA, 22 bp, Artificial Sequence
  chemically synthesized
agataggacaattaagtgcact

SEQ ID NO: 69950 - DNA, 22 bp, Artificial Sequence
  chemically synthesized
agtgcactgtacaattttccca

SEQ ID NO: 69951 - DNA, 22 bp, Artificial Sequence
  chemically synthesized
tacaattttcccagtttacagg

SEQ ID NO: 69952 - DNA, 22 bp, Artificial Sequence
  chemically synthesized
tcccagtttacaggtctatact

SEQ ID NO: 69953 - DNA, 22 bp, Artificial Sequence
  chemically synthesized
cccagtttacaggtctatactt

SEQ ID NO: 69954 - DNA, 22 bp, Artificial Sequence
  chemically synthesized
ccagtttacaggtctatactta

SEQ ID NO: 69955 - DNA, 22 bp, Artificial Sequence
  chemically synthesized
acaggtctatacttaagggaaa

SEQ ID NO: 69956 - DNA, 22 bp, Artificial Sequence
  chemically synthesized
caggtctatacttaagggaaaa

SEQ ID NO: 69957 - DNA, 22 bp, Artificial Sequence
  chemically synthesized
tacttaagggaaaagttgcaag

SEQ ID NO: 69958 - DNA, 22 bp, Artificial Sequence
  chemically synthesized
aagggaaaagttgcaagaatgc

SEQ ID NO: 69959 - DNA, 22 bp, Artificial Sequence
  chemically synthesized
agggaaaagttgcaagaatgct

SEQ ID NO: 69960 - DNA, 22 bp, Artificial Sequence
  chemically synthesized
caagaatgctgaaaaaaaattg

SEQ ID NO: 69961 - DNA, 22 bp, Artificial Sequence
  chemically synthesized
aaaaaaaattgaacacaatctc

SEQ ID NO: 69962 - DNA, 22 bp, Artificial Sequence
  chemically synthesized
aacacaatctcattgaggagca

SEQ ID NO: 69963 - DNA, 22 bp, Artificial Sequence
  chemically synthesized
attgaggagcattttttaaaaa

SEQ ID NO: 69964 - DNA, 22 bp, Artificial Sequence
  chemically synthesized
aggagcattttttaaaaactaa

SEQ ID NO: 69965 - DNA, 22 bp, Artificial Sequence
  chemically synthesized
tttaaaaactaaaaaaaaaaaa

SEQ ID NO: 69966 - DNA, 22 bp, Artificial Sequence
  chemically synthesized
ttaaaaactaaaaaaaaaaaaa

SEQ ID NO: 69967 - DNA, 22 bp, Artificial Sequence
  chemically synthesized
taaaaactaaaaaaaaaaaaac

SEQ ID NO: 69968 - DNA, 22 bp, Artificial Sequence
  chemically synthesized
aaaaactaaaaaaaaaaaaact

SEQ ID NO: 69969 - DNA, 22 bp, Artificial Sequence
  chemically synthesized
aaaactaaaaaaaaaaaaactt

SEQ ID NO: 69970 - DNA, 22 bp, Artificial Sequence
  chemically synthesized
aaaaaaaaaaaactttgccagc

SEQ ID NO: 69971 - DNA, 22 bp, Artificial Sequence
  chemically synthesized
tgccagccatttacttgactat

SEQ ID NO: 69972 - DNA, 22 bp, Artificial Sequence
  chemically synthesized
gccagccatttacttgactatt

SEQ ID NO: 69973 - DNA, 22 bp, Artificial Sequence
  chemically synthesized
ccagccatttacttgactattg

SEQ ID NO: 69974 - DNA, 22 bp, Artificial Sequence
  chemically synthesized
acttgactattgagcttactta

SEQ ID NO: 69975 - DNA, 22 bp, Artificial Sequence
  chemically synthesized
cttgactattgagcttacttac

SEQ ID NO: 69976 - DNA, 22 bp, Artificial Sequence
  chemically synthesized
gactattgagcttacttacttg

SEQ ID NO: 69977 - DNA, 22 bp, Artificial Sequence
  chemically synthesized
actattgagcttacttacttgg

SEQ ID NO: 69978 - DNA, 22 bp, Artificial Sequence
  chemically synthesized
ttgagcttacttacttggacgc

SEQ ID NO: 69979 - DNA, 22 bp, Artificial Sequence
  chemically synthesized
agcttacttacttggacgcaac

SEQ ID NO: 69980 - DNA, 22 bp, Artificial Sequence
  chemically synthesized
acttacttggacgcaacattgc

SEQ ID NO: 69981 - DNA, 22 bp, Artificial Sequence
  chemically synthesized
cttacttggacgcaacattgca

SEQ ID NO: 69982 - DNA, 22 bp, Artificial Sequence
  chemically synthesized
acttggacgcaacattgcaagc

SEQ ID NO: 69983 - DNA, 22 bp, Artificial Sequence
  chemically synthesized
cttggacgcaacattgcaagcg

SEQ ID NO: 69984 - DNA, 22 bp, Artificial Sequence
  chemically synthesized
ggacgcaacattgcaagcgctg

SEQ ID NO: 69985 - DNA, 22 bp, Artificial Sequence
  chemically synthesized
gacgcaacattgcaagcgctgt

SEQ ID NO: 69986 - DNA, 22 bp, Artificial Sequence
  chemically synthesized
caagcgctgtgaatggaaacag

SEQ ID NO: 69987 - DNA, 22 bp, Artificial Sequence
  chemically synthesized
tgaatggaaacagaatacactt

SEQ ID NO: 69988 - DNA, 22 bp, Artificial Sequence
  chemically synthesized
aacatagaaatgaatgattgct

SEQ ID NO: 69989 - DNA, 22 bp, Artificial Sequence
  chemically synthesized
acatagaaatgaatgattgctt

SEQ ID NO: 69990 - DNA, 22 bp, Artificial Sequence
  chemically synthesized
ctttcgcttctacagtgcaagg

SEQ ID NO: 69991 - DNA, 22 bp, Artificial Sequence
  chemically synthesized
tcgcttctacagtgcaaggatt

SEQ ID NO: 69992 - DNA, 22 bp, Artificial Sequence
  chemically synthesized
cgcttctacagtgcaaggattt

SEQ ID NO: 69993 - DNA, 22 bp, Artificial Sequence
  chemically synthesized
gcttctacagtgcaaggatttt

SEQ ID NO: 69994 - DNA, 22 bp, Artificial Sequence
  chemically synthesized
ctacagtgcaaggatttttttg

SEQ ID NO: 69995 - DNA, 22 bp, Artificial Sequence
  chemically synthesized
tacagtgcaaggatttttttgt

SEQ ID NO: 69996 - DNA, 22 bp, Artificial Sequence
  chemically synthesized
cagtgcaaggatttttttgtac

SEQ ID NO: 69997 - DNA, 22 bp, Artificial Sequence
  chemically synthesized
ttttgtacaaaacttttttaaa

SEQ ID NO: 69998 - DNA, 22 bp, Artificial Sequence
  chemically synthesized
tttgtacaaaacttttttaaat

SEQ ID NO: 69999 - DNA, 22 bp, Artificial Sequence
  chemically synthesized
ttgtacaaaacttttttaaata

SEQ ID NO: 70000 - DNA, 22 bp, Artificial Sequence
  chemically synthesized
tgtacaaaacttttttaaatat

SEQ ID NO: 70001 - DNA, 22 bp, Artificial Sequence
  chemically synthesized
gtacaaaacttttttaaatata

SEQ ID NO: 70002 - DNA, 22 bp, Artificial Sequence
  chemically synthesized
tacaaaacttttttaaatataa

SEQ ID NO: 70003 - DNA, 22 bp, Artificial Sequence
  chemically synthesized
ttttaaatataaatgttaagaa

SEQ ID NO: 70004 - DNA, 22 bp, Artificial Sequence
  chemically synthesized
tttaaatataaatgttaagaaa

SEQ ID NO: 70005 - DNA, 22 bp, Artificial Sequence
  chemically synthesized
ttaaatataaatgttaagaaaa

SEQ ID NO: 70006 - DNA, 22 bp, Artificial Sequence
  chemically synthesized
taaatataaatgttaagaaaaa

SEQ ID NO: 70007 - DNA, 22 bp, Artificial Sequence
  chemically synthesized
aaatataaatgttaagaaaaat

SEQ ID NO: 70008 - DNA, 22 bp, Artificial Sequence
  chemically synthesized
aatataaatgttaagaaaaatt

SEQ ID NO: 70009 - DNA, 22 bp, Artificial Sequence
  chemically synthesized
agaaaaattttttttaaaaaac

SEQ ID NO: 70010 - DNA, 22 bp, Artificial Sequence
  chemically synthesized
tttttaaaaaacacttcattat

SEQ ID NO: 70011 - DNA, 22 bp, Artificial Sequence
  chemically synthesized
ttttaaaaaacacttcattatg

SEQ ID NO: 70012 - DNA, 22 bp, Artificial Sequence
  chemically synthesized
tttaaaaaacacttcattatgt

SEQ ID NO: 70013 - DNA, 22 bp, Artificial Sequence
  chemically synthesized
ttaaaaaacacttcattatgtt

SEQ ID NO: 70014 - DNA, 22 bp, Artificial Sequence
  chemically synthesized
taaaaaacacttcattatgttt

SEQ ID NO: 70015 - DNA, 22 bp, Artificial Sequence
  chemically synthesized
aaaaaacacttcattatgttta

SEQ ID NO: 70016 - DNA, 22 bp, Artificial Sequence
  chemically synthesized
aaaaacacttcattatgtttag

SEQ ID NO: 70017 - DNA, 22 bp, Artificial Sequence
  chemically synthesized
cattatgtttaggggggaactg

SEQ ID NO: 70018 - DNA, 22 bp, Artificial Sequence
  chemically synthesized
attatgtttaggggggaactgc

SEQ ID NO: 70019 - DNA, 22 bp, Artificial Sequence
  chemically synthesized
tgtttaggggggaactgcattt

SEQ ID NO: 70020 - DNA, 22 bp, Artificial Sequence
  chemically synthesized
aggggggaactgcattttaggg

SEQ ID NO: 70021 - DNA, 22 bp, Artificial Sequence
  chemically synthesized
ggggggaactgcattttagggt

SEQ ID NO: 70022 - DNA, 22 bp, Artificial Sequence
  chemically synthesized
cattttagggttccattgtctt

SEQ ID NO: 70023 - DNA, 22 bp, Artificial Sequence
  chemically synthesized
tagggttccattgtcttggtgg

SEQ ID NO: 70024 - DNA, 22 bp, Artificial Sequence
  chemically synthesized
agggttccattgtcttggtggt

SEQ ID NO: 70025 - DNA, 22 bp, Artificial Sequence
  chemically synthesized
gggttccattgtcttggtggtg

SEQ ID NO: 70026 - DNA, 22 bp, Artificial Sequence
  chemically synthesized
cattgtcttggtggtgttacaa

SEQ ID NO: 70027 - DNA, 22 bp, Artificial Sequence
  chemically synthesized
tcttggtggtgttacaagactt

SEQ ID NO: 70028 - DNA, 22 bp, Artificial Sequence
  chemically synthesized
ggtggtgttacaagacttgtta

SEQ ID NO: 70029 - DNA, 22 bp, Artificial Sequence
  chemically synthesized
gtggtgttacaagacttgttat

SEQ ID NO: 70030 - DNA, 22 bp, Artificial Sequence
  chemically synthesized
caagacttgttatccatttaaa

SEQ ID NO: 70031 - DNA, 22 bp, Artificial Sequence
  chemically synthesized
gttatccatttaaaaatggtag

SEQ ID NO: 70032 - DNA, 22 bp, Artificial Sequence
  chemically synthesized
ttatccatttaaaaatggtagt

SEQ ID NO: 70033 - DNA, 22 bp, Artificial Sequence
  chemically synthesized
tccatttaaaaatggtagtgga

SEQ ID NO: 70034 - DNA, 22 bp, Artificial Sequence
  chemically synthesized
aaaaatggtagtggaaattcta

SEQ ID NO: 70035 - DNA, 22 bp, Artificial Sequence
  chemically synthesized
aaaatggtagtggaaattctat

SEQ ID NO: 70036 - DNA, 22 bp, Artificial Sequence
  chemically synthesized
tatgccttggatacacaccgct

SEQ ID NO: 70037 - DNA, 22 bp, Artificial Sequence
  chemically synthesized
tgccttggatacacaccgctct

SEQ ID NO: 70038 - DNA, 22 bp, Artificial Sequence
  chemically synthesized
ggatacacaccgctcttcaggt

SEQ ID NO: 70039 - DNA, 22 bp, Artificial Sequence
  chemically synthesized
gatacacaccgctcttcaggtt

SEQ ID NO: 70040 - DNA, 22 bp, Artificial Sequence
  chemically synthesized
ttcaggttgtaaaaaaaaaaaa

SEQ ID NO: 70041 - DNA, 22 bp, Artificial Sequence
  chemically synthesized
caggttgtaaaaaaaaaaaaca

SEQ ID NO: 70042 - DNA, 22 bp, Artificial Sequence
  chemically synthesized
aggttgtaaaaaaaaaaaacat

SEQ ID NO: 70043 - DNA, 22 bp, Artificial Sequence
  chemically synthesized
taaaaaaaaaaaacatacattg

SEQ ID NO: 70044 - DNA, 22 bp, Artificial Sequence
  chemically synthesized
gggaaaggtttaagattatata

SEQ ID NO: 70045 - DNA, 22 bp, Artificial Sequence
  chemically synthesized
aagattatatagtacttaaata

SEQ ID NO: 70046 - DNA, 22 bp, Artificial Sequence
  chemically synthesized
agattatatagtacttaaatat

SEQ ID NO: 70047 - DNA, 22 bp, Artificial Sequence
  chemically synthesized
tatagtacttaaatataggaaa

SEQ ID NO: 70048 - DNA, 22 bp, Artificial Sequence
  chemically synthesized
aaatataggaaaatgcacactc

SEQ ID NO: 70049 - DNA, 22 bp, Artificial Sequence
  chemically synthesized
aatataggaaaatgcacactca

SEQ ID NO: 70050 - DNA, 22 bp, Artificial Sequence
  chemically synthesized
atgttgattcctatgctaaaat

SEQ ID NO: 70051 - DNA, 22 bp, Artificial Sequence
  chemically synthesized
attcctatgctaaaatacattt

SEQ ID NO: 70052 - DNA, 22 bp, Artificial Sequence
  chemically synthesized
ctatgctaaaatacatttatgg

SEQ ID NO: 70053 - DNA, 22 bp, Artificial Sequence
  chemically synthesized
tgctaaaatacatttatggtct

SEQ ID NO: 70054 - DNA, 22 bp, Artificial Sequence
  chemically synthesized
aaatacatttatggtctttttt

SEQ ID NO: 70055 - DNA, 22 bp, Artificial Sequence
  chemically synthesized
atggtcttttttctgtatttct

SEQ ID NO: 70056 - DNA, 22 bp, Artificial Sequence
  chemically synthesized
tggtcttttttctgtatttcta

SEQ ID NO: 70057 - DNA, 22 bp, Artificial Sequence
  chemically synthesized
ttttctgtatttctagaatggt

SEQ ID NO: 70058 - DNA, 22 bp, Artificial Sequence
  chemically synthesized
tttctgtatttctagaatggta

SEQ ID NO: 70059 - DNA, 22 bp, Artificial Sequence
  chemically synthesized
ttctgtatttctagaatggtat

SEQ ID NO: 70060 - DNA, 22 bp, Artificial Sequence
  chemically synthesized
tctgtatttctagaatggtatt

SEQ ID NO: 70061 - DNA, 22 bp, Artificial Sequence
  chemically synthesized
ctgtatttctagaatggtattt

SEQ ID NO: 70062 - DNA, 22 bp, Artificial Sequence
  chemically synthesized
tgtatttctagaatggtatttg

SEQ ID NO: 70063 - DNA, 22 bp, Artificial Sequence
  chemically synthesized
tatttctagaatggtatttgaa

SEQ ID NO: 70064 - DNA, 22 bp, Artificial Sequence
  chemically synthesized
ctagaatggtatttgaattaaa

SEQ ID NO: 70065 - DNA, 22 bp, Artificial Sequence
  chemically synthesized
tagaatggtatttgaattaaat

SEQ ID NO: 70066 - DNA, 22 bp, Artificial Sequence
  chemically synthesized
gaatggtatttgaattaaatgt

SEQ ID NO: 70067 - DNA, 22 bp, Artificial Sequence
  chemically synthesized
gaattaaatgttcatctagtgt

SEQ ID NO: 70068 - DNA, 22 bp, Artificial Sequence
  chemically synthesized
aattaaatgttcatctagtgtt

SEQ ID NO: 70069 - DNA, 22 bp, Artificial Sequence
  chemically synthesized
aatgttcatctagtgttaggca

SEQ ID NO: 70070 - DNA, 22 bp, Artificial Sequence
  chemically synthesized
atctagtgttaggcactatagt

SEQ ID NO: 70071 - DNA, 22 bp, Artificial Sequence
  chemically synthesized
gtgttaggcactatagtattta

SEQ ID NO: 70072 - DNA, 22 bp, Artificial Sequence
  chemically synthesized
ggcactatagtatttatattga

SEQ ID NO: 70073 - DNA, 22 bp, Artificial Sequence
  chemically synthesized
tagtatttatattgaagcttgt

SEQ ID NO: 70074 - DNA, 22 bp, Artificial Sequence
  chemically synthesized
atattgaagcttgtatttttaa

SEQ ID NO: 70075 - DNA, 22 bp, Artificial Sequence
  chemically synthesized
tattgaagcttgtatttttaac

SEQ ID NO: 70076 - DNA, 22 bp, Artificial Sequence
  chemically synthesized
aagcttgtatttttaactgttg

SEQ ID NO: 70077 - DNA, 22 bp, Artificial Sequence
  chemically synthesized
gtatttttaactgttgcttgtt

SEQ ID NO: 70078 - DNA, 22 bp, Artificial Sequence
  chemically synthesized
tatttttaactgttgcttgttc

SEQ ID NO: 70079 - DNA, 22 bp, Artificial Sequence
  chemically synthesized
ttaactgttgcttgttctctta

SEQ ID NO: 70080 - DNA, 22 bp, Artificial Sequence
  chemically synthesized
taactgttgcttgttctcttaa

SEQ ID NO: 70081 - DNA, 22 bp, Artificial Sequence
  chemically synthesized
aactgttgcttgttctcttaaa

SEQ ID NO: 70082 - DNA, 22 bp, Artificial Sequence
  chemically synthesized
actgttgcttgttctcttaaaa

SEQ ID NO: 70083 - DNA, 22 bp, Artificial Sequence
  chemically synthesized
ttgcttgttctcttaaaaggta

SEQ ID NO: 70084 - DNA, 22 bp, Artificial Sequence
  chemically synthesized
cttgttctcttaaaaggtatca

SEQ ID NO: 70085 - DNA, 22 bp, Artificial Sequence
  chemically synthesized
gttctcttaaaaggtatcaatg

SEQ ID NO: 70086 - DNA, 22 bp, Artificial Sequence
  chemically synthesized
ttctcttaaaaggtatcaatgt

SEQ ID NO: 70087 - DNA, 22 bp, Artificial Sequence
  chemically synthesized
tcttaaaaggtatcaatgtacc

SEQ ID NO: 70088 - DNA, 22 bp, Artificial Sequence
  chemically synthesized
ttaaaaggtatcaatgtacctt

SEQ ID NO: 70089 - DNA, 22 bp, Artificial Sequence
  chemically synthesized
aaaaggtatcaatgtacctttt

SEQ ID NO: 70090 - DNA, 22 bp, Artificial Sequence
  chemically synthesized
aaaggtatcaatgtaccttttt

SEQ ID NO: 70091 - DNA, 22 bp, Artificial Sequence
  chemically synthesized
ttttggtagtggaaaaaaaaaa

SEQ ID NO: 70092 - DNA, 22 bp, Artificial Sequence
  chemically synthesized
tttggtagtggaaaaaaaaaag

SEQ ID NO: 70093 - DNA, 22 bp, Artificial Sequence
  chemically synthesized
ttggtagtggaaaaaaaaaaga

SEQ ID NO: 70094 - DNA, 22 bp, Artificial Sequence
  chemically synthesized
tggtagtggaaaaaaaaaagac

SEQ ID NO: 70095 - DNA, 22 bp, Artificial Sequence
  chemically synthesized
ggtagtggaaaaaaaaaagaca

SEQ ID NO: 70096 - DNA, 22 bp, Artificial Sequence
  chemically synthesized
gtagtggaaaaaaaaaagacag

SEQ ID NO: 70097 - DNA, 22 bp, Artificial Sequence
  chemically synthesized
ccacagtatatttttttaattt

SEQ ID NO: 70098 - DNA, 22 bp, Artificial Sequence
  chemically synthesized
ttttaatttggcaggataatat

SEQ ID NO: 70099 - DNA, 22 bp, Artificial Sequence
  chemically synthesized
tttaatttggcaggataatata

SEQ ID NO: 70100 - DNA, 22 bp, Artificial Sequence
  chemically synthesized
ttaatttggcaggataatatag

SEQ ID NO: 70101 - DNA, 22 bp, Artificial Sequence
  chemically synthesized
taatttggcaggataatatagt

SEQ ID NO: 70102 - DNA, 22 bp, Artificial Sequence
  chemically synthesized
aatttggcaggataatatagtg

SEQ ID NO: 70103 - DNA, 22 bp, Artificial Sequence
  chemically synthesized
atttggcaggataatatagtgc

SEQ ID NO: 70104 - DNA, 22 bp, Artificial Sequence
  chemically synthesized
ggcaggataatatagtgcaaat

SEQ ID NO: 70105 - DNA, 22 bp, Artificial Sequence
  chemically synthesized
gcaggataatatagtgcaaatt

SEQ ID NO: 70106 - DNA, 22 bp, Artificial Sequence
  chemically synthesized
tttgtatgcttcaaaaaaaaaa

SEQ ID NO: 70107 - DNA, 22 bp, Artificial Sequence
  chemically synthesized
gtatgcttcaaaaaaaaaaaaa

SEQ ID NO: 70108 - DNA, 22 bp, Artificial Sequence
  chemically synthesized
tatgcttcaaaaaaaaaaaaaa

SEQ ID NO: 70109 - DNA, 22 bp, Artificial Sequence
  chemically synthesized
caaaaaaaaaaaaaagagagaa

SEQ ID NO: 70110 - DNA, 22 bp, Artificial Sequence
  chemically synthesized
aaaaaaaaaaaaaagagagaaa

SEQ ID NO: 70111 - DNA, 22 bp, Artificial Sequence
  chemically synthesized
cagatgagaagccatataatgg

SEQ ID NO: 70112 - DNA, 22 bp, Artificial Sequence
  chemically synthesized
gggggagcctgctagaatgtca

SEQ ID NO: 70113 - DNA, 22 bp, Artificial Sequence
  chemically synthesized
ggggagcctgctagaatgtcac

SEQ ID NO: 70114 - DNA, 22 bp, Artificial Sequence
  chemically synthesized
ctagaatgtcacatggatggct

SEQ ID NO: 70115 - DNA, 22 bp, Artificial Sequence
  chemically synthesized
gaatgtcacatggatggctgtc

SEQ ID NO: 70116 - DNA, 22 bp, Artificial Sequence
  chemically synthesized
tcataggggttgtacatatcct

SEQ ID NO: 70117 - DNA, 22 bp, Artificial Sequence
  chemically synthesized
tacatatccttttttgttcctt

SEQ ID NO: 70118 - DNA, 22 bp, Artificial Sequence
  chemically synthesized
ttttgttcctttttcctgctgc

SEQ ID NO: 70119 - DNA, 22 bp, Artificial Sequence
  chemically synthesized
tttgttcctttttcctgctgcc

SEQ ID NO: 70120 - DNA, 22 bp, Artificial Sequence
  chemically synthesized
ttgttcctttttcctgctgcca

SEQ ID NO: 70121 - DNA, 22 bp, Artificial Sequence
  chemically synthesized
tgttcctttttcctgctgccat

SEQ ID NO: 70122 - DNA, 22 bp, Artificial Sequence
  chemically synthesized
gttcctttttcctgctgccata

SEQ ID NO: 70123 - DNA, 22 bp, Artificial Sequence
  chemically synthesized
ttcctttttcctgctgccatac

SEQ ID NO: 70124 - DNA, 22 bp, Artificial Sequence
  chemically synthesized
ctttttcctgctgccatactgt

SEQ ID NO: 70125 - DNA, 22 bp, Artificial Sequence
  chemically synthesized
tttcctgctgccatactgtatg

SEQ ID NO: 70126 - DNA, 22 bp, Artificial Sequence
  chemically synthesized
ttcctgctgccatactgtatgc

SEQ ID NO: 70127 - DNA, 22 bp, Artificial Sequence
  chemically synthesized
tcctgctgccatactgtatgca

SEQ ID NO: 70128 - DNA, 22 bp, Artificial Sequence
  chemically synthesized
cctgctgccatactgtatgcag

SEQ ID NO: 70129 - DNA, 22 bp, Artificial Sequence
  chemically synthesized
ctgctgccatactgtatgcagt

SEQ ID NO: 70130 - DNA, 22 bp, Artificial Sequence
  chemically synthesized
ctgccatactgtatgcagtact

SEQ ID NO: 70131 - DNA, 22 bp, Artificial Sequence
  chemically synthesized
ccatactgtatgcagtactgca

SEQ ID NO: 70132 - DNA, 22 bp, Artificial Sequence
  chemically synthesized
tatgcagtactgcaagctaata

SEQ ID NO: 70133 - DNA, 22 bp, Artificial Sequence
  chemically synthesized
caagctaataacgttggtttgt

SEQ ID NO: 70134 - DNA, 22 bp, Artificial Sequence
  chemically synthesized
ataacgttggtttgttatgtag

SEQ ID NO: 70135 - DNA, 22 bp, Artificial Sequence
  chemically synthesized
gtttgttatgtagtgtgctttt

SEQ ID NO: 70136 - DNA, 22 bp, Artificial Sequence
  chemically synthesized
gttatgtagtgtgctttttgtc

SEQ ID NO: 70137 - DNA, 22 bp, Artificial Sequence
  chemically synthesized
ttatgtagtgtgctttttgtcc

SEQ ID NO: 70138 - DNA, 22 bp, Artificial Sequence
  chemically synthesized
tgtagtgtgctttttgtccctt

SEQ ID NO: 70139 - DNA, 22 bp, Artificial Sequence
  chemically synthesized
tttgtccctttccttctatcac

SEQ ID NO: 70140 - DNA, 22 bp, Artificial Sequence
  chemically synthesized
ttgtccctttccttctatcacc

SEQ ID NO: 70141 - DNA, 22 bp, Artificial Sequence
  chemically synthesized
tgtccctttccttctatcaccc

SEQ ID NO: 70142 - DNA, 22 bp, Artificial Sequence
  chemically synthesized
gtccctttccttctatcaccct

SEQ ID NO: 70143 - DNA, 22 bp, Artificial Sequence
  chemically synthesized
tccctttccttctatcacccta

SEQ ID NO: 70144 - DNA, 22 bp, Artificial Sequence
  chemically synthesized
tccttctatcaccctacattcc

SEQ ID NO: 70145 - DNA, 22 bp, Artificial Sequence
  chemically synthesized
ccttctatcaccctacattcca

SEQ ID NO: 70146 - DNA, 22 bp, Artificial Sequence
  chemically synthesized
cttctatcaccctacattccag

SEQ ID NO: 70147 - DNA, 22 bp, Artificial Sequence
  chemically synthesized
ctatcaccctacattccagcat

SEQ ID NO: 70148 - DNA, 22 bp, Artificial Sequence
  chemically synthesized
tatcaccctacattccagcatc

SEQ ID NO: 70149 - DNA, 22 bp, Artificial Sequence
  chemically synthesized
tcaccctacattccagcatctt

SEQ ID NO: 70150 - DNA, 22 bp, Artificial Sequence
  chemically synthesized
cattccagcatcttaccttcat

SEQ ID NO: 70151 - DNA, 22 bp, Artificial Sequence
  chemically synthesized
cagcatcttaccttcatatgca

SEQ ID NO: 70152 - DNA, 22 bp, Artificial Sequence
  chemically synthesized
accttcatatgcagtaaaagaa

SEQ ID NO: 70153 - DNA, 22 bp, Artificial Sequence
  chemically synthesized
ccttcatatgcagtaaaagaaa

SEQ ID NO: 70154 - DNA, 22 bp, Artificial Sequence
  chemically synthesized
catatgcagtaaaagaaagaaa

SEQ ID NO: 70155 - DNA, 22 bp, Artificial Sequence
  chemically synthesized
atatgcagtaaaagaaagaaag

SEQ ID NO: 70156 - DNA, 22 bp, Artificial Sequence
  chemically synthesized
tgcagtttttttcattgccaaa

SEQ ID NO: 70157 - DNA, 22 bp, Artificial Sequence
  chemically synthesized
gcagtttttttcattgccaaaa

SEQ ID NO: 70158 - DNA, 22 bp, Artificial Sequence
  chemically synthesized
cagtttttttcattgccaaaaa

SEQ ID NO: 70159 - DNA, 22 bp, Artificial Sequence
  chemically synthesized
ttttcattgccaaaaactaaat

SEQ ID NO: 70160 - DNA, 22 bp, Artificial Sequence
  chemically synthesized
tttcattgccaaaaactaaatg

SEQ ID NO: 70161 - DNA, 22 bp, Artificial Sequence
  chemically synthesized
ttcattgccaaaaactaaatgg

SEQ ID NO: 70162 - DNA, 22 bp, Artificial Sequence
  chemically synthesized
tcattgccaaaaactaaatggt

SEQ ID NO: 70163 - DNA, 22 bp, Artificial Sequence
  chemically synthesized
cattgccaaaaactaaatggtg

SEQ ID NO: 70164 - DNA, 22 bp, Artificial Sequence
  chemically synthesized
attgccaaaaactaaatggtgc

SEQ ID NO: 70165 - DNA, 22 bp, Artificial Sequence
  chemically synthesized
ccaaaaactaaatggtgcttta

SEQ ID NO: 70166 - DNA, 22 bp, Artificial Sequence
  chemically synthesized
aatggtgctttatatttagatt

SEQ ID NO: 70167 - DNA, 22 bp, Artificial Sequence
  chemically synthesized
tatatttagattggaaagaatt

SEQ ID NO: 70168 - DNA, 22 bp, Artificial Sequence
  chemically synthesized
atatttagattggaaagaattt

SEQ ID NO: 70169 - DNA, 22 bp, Artificial Sequence
  chemically synthesized
tatttagattggaaagaatttc

SEQ ID NO: 70170 - DNA, 22 bp, Artificial Sequence
  chemically synthesized
agattggaaagaatttcatatg

SEQ ID NO: 70171 - DNA, 22 bp, Artificial Sequence
  chemically synthesized
gattggaaagaatttcatatgc

SEQ ID NO: 70172 - DNA, 22 bp, Artificial Sequence
  chemically synthesized
gaaagaatttcatatgcaaagc

SEQ ID NO: 70173 - DNA, 22 bp, Artificial Sequence
  chemically synthesized
catatgcaaagcatattaaaga

SEQ ID NO: 70174 - DNA, 22 bp, Artificial Sequence
  chemically synthesized
atatgcaaagcatattaaagag

SEQ ID NO: 70175 - DNA, 22 bp, Artificial Sequence
  chemically synthesized
aagagaaagcccgctttagtca

SEQ ID NO: 70176 - DNA, 22 bp, Artificial Sequence
  chemically synthesized
tagtcaatacttttttgtaaat

SEQ ID NO: 70177 - DNA, 22 bp, Artificial Sequence
  chemically synthesized
agtcaatacttttttgtaaatg

SEQ ID NO: 70178 - DNA, 22 bp, Artificial Sequence
  chemically synthesized
gtcaatacttttttgtaaatgg

SEQ ID NO: 70179 - DNA, 22 bp, Artificial Sequence
  chemically synthesized
ttttgtaaatggcaatgcagaa

SEQ ID NO: 70180 - DNA, 22 bp, Artificial Sequence
  chemically synthesized
tttgtaaatggcaatgcagaat

SEQ ID NO: 70181 - DNA, 22 bp, Artificial Sequence
  chemically synthesized
ttgtaaatggcaatgcagaata

SEQ ID NO: 70182 - DNA, 22 bp, Artificial Sequence
  chemically synthesized
tgtaaatggcaatgcagaatat

SEQ ID NO: 70183 - DNA, 22 bp, Artificial Sequence
  chemically synthesized
gtaaatggcaatgcagaatatt

SEQ ID NO: 70184 - DNA, 22 bp, Artificial Sequence
  chemically synthesized
taaatggcaatgcagaatattt

SEQ ID NO: 70185 - DNA, 22 bp, Artificial Sequence
  chemically synthesized
tgttattggccttttctattcc

SEQ ID NO: 70186 - DNA, 22 bp, Artificial Sequence
  chemically synthesized
gttattggccttttctattcct

SEQ ID NO: 70187 - DNA, 22 bp, Artificial Sequence
  chemically synthesized
ttattggccttttctattcctg

SEQ ID NO: 70188 - DNA, 22 bp, Artificial Sequence
  chemically synthesized
ttggccttttctattcctgtaa

SEQ ID NO: 70189 - DNA, 22 bp, Artificial Sequence
  chemically synthesized
gccttttctattcctgtaatga

SEQ ID NO: 70190 - DNA, 22 bp, Artificial Sequence
  chemically synthesized
ttctattcctgtaatgaaagct

SEQ ID NO: 70191 - DNA, 22 bp, Artificial Sequence
  chemically synthesized
tctattcctgtaatgaaagctg

SEQ ID NO: 70192 - DNA, 22 bp, Artificial Sequence
  chemically synthesized
ctattcctgtaatgaaagctgt

SEQ ID NO: 70193 - DNA, 22 bp, Artificial Sequence
  chemically synthesized
tattcctgtaatgaaagctgtt

SEQ ID NO: 70194 - DNA, 22 bp, Artificial Sequence
  chemically synthesized
ttcctgtaatgaaagctgtttg

SEQ ID NO: 70195 - DNA, 22 bp, Artificial Sequence
  chemically synthesized
ctgtaatgaaagctgtttgtcg

SEQ ID NO: 70196 - DNA, 22 bp, Artificial Sequence
  chemically synthesized
taatgaaagctgtttgtcgtaa

SEQ ID NO: 70197 - DNA, 22 bp, Artificial Sequence
  chemically synthesized
tttgtcgtaacttgaaatttta

SEQ ID NO: 70198 - DNA, 22 bp, Artificial Sequence
  chemically synthesized
gtcgtaacttgaaattttatct

SEQ ID NO: 70199 - DNA, 22 bp, Artificial Sequence
  chemically synthesized
tcgtaacttgaaattttatctt

SEQ ID NO: 70200 - DNA, 22 bp, Artificial Sequence
  chemically synthesized
gaaattttatcttttactatgg

SEQ ID NO: 70201 - DNA, 22 bp, Artificial Sequence
  chemically synthesized
aaattttatcttttactatggg

SEQ ID NO: 70202 - DNA, 22 bp, Artificial Sequence
  chemically synthesized
tatcttttactatgggagtcac

SEQ ID NO: 70203 - DNA, 22 bp, Artificial Sequence
  chemically synthesized
atcttttactatgggagtcact

SEQ ID NO: 70204 - DNA, 22 bp, Artificial Sequence
  chemically synthesized
tcttttactatgggagtcacta

SEQ ID NO: 70205 - DNA, 22 bp, Artificial Sequence
  chemically synthesized
ttactatgggagtcactattta

SEQ ID NO: 70206 - DNA, 22 bp, Artificial Sequence
  chemically synthesized
tactatgggagtcactatttat

SEQ ID NO: 70207 - DNA, 22 bp, Artificial Sequence
  chemically synthesized
actatgggagtcactatttatt

SEQ ID NO: 70208 - DNA, 22 bp, Artificial Sequence
  chemically synthesized
ctatgggagtcactatttatta

SEQ ID NO: 70209 - DNA, 22 bp, Artificial Sequence
  chemically synthesized
tgggagtcactatttattattg

SEQ ID NO: 70210 - DNA, 22 bp, Artificial Sequence
  chemically synthesized
tttattattgcttatgtgccct

SEQ ID NO: 70211 - DNA, 22 bp, Artificial Sequence
  chemically synthesized
attattgcttatgtgccctgtt

SEQ ID NO: 70212 - DNA, 22 bp, Artificial Sequence
  chemically synthesized
ttattgcttatgtgccctgttc

SEQ ID NO: 70213 - DNA, 22 bp, Artificial Sequence
  chemically synthesized
ttgcttatgtgccctgttcaaa

SEQ ID NO: 70214 - DNA, 22 bp, Artificial Sequence
  chemically synthesized
cttatgtgccctgttcaaaaca

SEQ ID NO: 70215 - DNA, 22 bp, Artificial Sequence
  chemically synthesized
atgtgccctgttcaaaacagag

SEQ ID NO: 70216 - DNA, 22 bp, Artificial Sequence
  chemically synthesized
tgtgccctgttcaaaacagagg

SEQ ID NO: 70217 - DNA, 22 bp, Artificial Sequence
  chemically synthesized
ttcaaaacagaggcacttaatt

SEQ ID NO: 70218 - DNA, 22 bp, Artificial Sequence
  chemically synthesized
aaaacagaggcacttaatttga

SEQ ID NO: 70219 - DNA, 22 bp, Artificial Sequence
  chemically synthesized
aatttgatcttttatttttctt

SEQ ID NO: 70220 - DNA, 22 bp, Artificial Sequence
  chemically synthesized
atttgatcttttatttttcttt

SEQ ID NO: 70221 - DNA, 22 bp, Artificial Sequence
  chemically synthesized
gatcttttatttttctttgttt

SEQ ID NO: 70222 - DNA, 22 bp, Artificial Sequence
  chemically synthesized
atcttttatttttctttgtttt

SEQ ID NO: 70223 - DNA, 22 bp, Artificial Sequence
  chemically synthesized
ttatttttctttgtttttattt

SEQ ID NO: 70224 - DNA, 22 bp, Artificial Sequence
  chemically synthesized
tatttttctttgtttttatttt

SEQ ID NO: 70225 - DNA, 22 bp, Artificial Sequence
  chemically synthesized
atttttctttgtttttattttt

SEQ ID NO: 70226 - DNA, 22 bp, Artificial Sequence
  chemically synthesized
tttttctttgtttttatttttt

SEQ ID NO: 70227 - DNA, 22 bp, Artificial Sequence
  chemically synthesized
ttctttgtttttattttttttt

SEQ ID NO: 70228 - DNA, 22 bp, Artificial Sequence
  chemically synthesized
tctttgtttttatttttttttt

SEQ ID NO: 70229 - DNA, 22 bp, Artificial Sequence
  chemically synthesized
ctttgtttttattttttttttt

SEQ ID NO: 70230 - DNA, 22 bp, Artificial Sequence
  chemically synthesized
tttgtttttattttttttttta

SEQ ID NO: 70231 - DNA, 22 bp, Artificial Sequence
  chemically synthesized
tgtttttatttttttttttatt

SEQ ID NO: 70232 - DNA, 22 bp, Artificial Sequence
  chemically synthesized
gtttttatttttttttttattt

SEQ ID NO: 70233 - DNA, 22 bp, Artificial Sequence
  chemically synthesized
tttttatttttttttttattta

SEQ ID NO: 70234 - DNA, 22 bp, Artificial Sequence
  chemically synthesized
ttatttttttttttatttagat

SEQ ID NO: 70235 - DNA, 22 bp, Artificial Sequence
  chemically synthesized
tatttttttttttatttagatg

SEQ ID NO: 70236 - DNA, 22 bp, Artificial Sequence
  chemically synthesized
atttttttttttatttagatga

SEQ ID NO: 70237 - DNA, 22 bp, Artificial Sequence
  chemically synthesized
tttttttttttatttagatgac

SEQ ID NO: 70238 - DNA, 22 bp, Artificial Sequence
  chemically synthesized
ttttttttatttagatgaccaa

SEQ ID NO: 70239 - DNA, 22 bp, Artificial Sequence
  chemically synthesized
tttttttatttagatgaccaaa

SEQ ID NO: 70240 - DNA, 22 bp, Artificial Sequence
  chemically synthesized
ttttttatttagatgaccaaag

SEQ ID NO: 70241 - DNA, 22 bp, Artificial Sequence
  chemically synthesized
tttttatttagatgaccaaagg

SEQ ID NO: 70242 - DNA, 22 bp, Artificial Sequence
  chemically synthesized
ttttatttagatgaccaaaggt

SEQ ID NO: 70243 - DNA, 22 bp, Artificial Sequence
  chemically synthesized
tttatttagatgaccaaaggtc

SEQ ID NO: 70244 - DNA, 22 bp, Artificial Sequence
  chemically synthesized
ttatttagatgaccaaaggtca

SEQ ID NO: 70245 - DNA, 22 bp, Artificial Sequence
  chemically synthesized
tatttagatgaccaaaggtcat

SEQ ID NO: 70246 - DNA, 22 bp, Artificial Sequence
  chemically synthesized
atttagatgaccaaaggtcatt

SEQ ID NO: 70247 - DNA, 22 bp, Artificial Sequence
  chemically synthesized
tttagatgaccaaaggtcatta

SEQ ID NO: 70248 - DNA, 22 bp, Artificial Sequence
  chemically synthesized
agatgaccaaaggtcattacaa

SEQ ID NO: 70249 - DNA, 22 bp, Artificial Sequence
  chemically synthesized
gatgaccaaaggtcattacaac

SEQ ID NO: 70250 - DNA, 22 bp, Artificial Sequence
  chemically synthesized
caacctggctttttattgtatt

SEQ ID NO: 70251 - DNA, 22 bp, Artificial Sequence
  chemically synthesized
gctttttattgtatttgtttct

SEQ ID NO: 70252 - DNA, 22 bp, Artificial Sequence
  chemically synthesized
tttattgtatttgtttctggtc

SEQ ID NO: 70253 - DNA, 22 bp, Artificial Sequence
  chemically synthesized
ttattgtatttgtttctggtct

SEQ ID NO: 70254 - DNA, 22 bp, Artificial Sequence
  chemically synthesized
tattgtatttgtttctggtctt

SEQ ID NO: 70255 - DNA, 22 bp, Artificial Sequence
  chemically synthesized
attgtatttgtttctggtcttt

SEQ ID NO: 70256 - DNA, 22 bp, Artificial Sequence
  chemically synthesized
ttgtatttgtttctggtctttg

SEQ ID NO: 70257 - DNA, 22 bp, Artificial Sequence
  chemically synthesized
tatttgtttctggtctttgtta

SEQ ID NO: 70258 - DNA, 22 bp, Artificial Sequence
  chemically synthesized
gtttctggtctttgttaagttc

SEQ ID NO: 70259 - DNA, 22 bp, Artificial Sequence
  chemically synthesized
tttctggtctttgttaagttct

SEQ ID NO: 70260 - DNA, 22 bp, Artificial Sequence
  chemically synthesized
ctggtctttgttaagttctatt

SEQ ID NO: 70261 - DNA, 22 bp, Artificial Sequence
  chemically synthesized
tggtctttgttaagttctattg

SEQ ID NO: 70262 - DNA, 22 bp, Artificial Sequence
  chemically synthesized
gtctttgttaagttctattgga

SEQ ID NO: 70263 - DNA, 22 bp, Artificial Sequence
  chemically synthesized
tgttaagttctattggaaaaac

SEQ ID NO: 70264 - DNA, 22 bp, Artificial Sequence
  chemically synthesized
gttaagttctattggaaaaacc

SEQ ID NO: 70265 - DNA, 22 bp, Artificial Sequence
  chemically synthesized
ttaagttctattggaaaaacca

SEQ ID NO: 70266 - DNA, 22 bp, Artificial Sequence
  chemically synthesized
agttctattggaaaaaccactg

SEQ ID NO: 70267 - DNA, 22 bp, Artificial Sequence
  chemically synthesized
tattggaaaaaccactgtctgt

SEQ ID NO: 70268 - DNA, 22 bp, Artificial Sequence
  chemically synthesized
ttggaaaaaccactgtctgtgt

SEQ ID NO: 70269 - DNA, 22 bp, Artificial Sequence
  chemically synthesized
gaaaaaccactgtctgtgtttt

SEQ ID NO: 70270 - DNA, 22 bp, Artificial Sequence
  chemically synthesized
tctgtgtttttttggcagttgt

SEQ ID NO: 70271 - DNA, 22 bp, Artificial Sequence
  chemically synthesized
tgtttttttggcagttgtctgc

SEQ ID NO: 70272 - DNA, 22 bp, Artificial Sequence
  chemically synthesized
ttttggcagttgtctgcattaa

SEQ ID NO: 70273 - DNA, 22 bp, Artificial Sequence
  chemically synthesized
tttggcagttgtctgcattaac

SEQ ID NO: 70274 - DNA, 22 bp, Artificial Sequence
  chemically synthesized
ttggcagttgtctgcattaacc

SEQ ID NO: 70275 - DNA, 22 bp, Artificial Sequence
  chemically synthesized
tggcagttgtctgcattaacct

SEQ ID NO: 70276 - DNA, 22 bp, Artificial Sequence
  chemically synthesized
ggcagttgtctgcattaacctg

SEQ ID NO: 70277 - DNA, 22 bp, Artificial Sequence
  chemically synthesized
gcagttgtctgcattaacctgt

SEQ ID NO: 70278 - DNA, 22 bp, Artificial Sequence
  chemically synthesized
tctgcattaacctgttcataca

SEQ ID NO: 70279 - DNA, 22 bp, Artificial Sequence
  chemically synthesized
cattaacctgttcatacaccca

SEQ ID NO: 70280 - DNA, 22 bp, Artificial Sequence
  chemically synthesized
acctgttcatacacccattttg

SEQ ID NO: 70281 - DNA, 22 bp, Artificial Sequence
  chemically synthesized
ttcatacacccattttgtccct

SEQ ID NO: 70282 - DNA, 22 bp, Artificial Sequence
  chemically synthesized
atacacccattttgtcccttta

SEQ ID NO: 70283 - DNA, 22 bp, Artificial Sequence
  chemically synthesized
tgtccctttattgaaaaaataa

SEQ ID NO: 70284 - DNA, 22 bp, Artificial Sequence
  chemically synthesized
gtccctttattgaaaaaataaa

SEQ ID NO: 70285 - DNA, 22 bp, Artificial Sequence
  chemically synthesized
tccctttattgaaaaaataaaa

SEQ ID NO: 70286 - DNA, 22 bp, Artificial Sequence
  chemically synthesized
tattgaaaaaataaaaaaaatt

SEQ ID NO: 70287 - DNA, 22 bp, Artificial Sequence
  chemically synthesized
attgaaaaaataaaaaaaatta

SEQ ID NO: 70288 - DNA, 22 bp, Artificial Sequence
  chemically synthesized
ttgaaaaaataaaaaaaattaa

SEQ ID NO: 70289 - DNA, 22 bp, Artificial Sequence
  chemically synthesized
aaaaaataaaaaaaattaaagt

SEQ ID NO: 70290 - DNA, 22 bp, Artificial Sequence
  chemically synthesized
aagtacacattgtaagcttctt

SEQ ID NO: 70291 - DNA, 22 bp, Artificial Sequence
  chemically synthesized
taagcttcttgtgtcctcattt

SEQ ID NO: 70292 - DNA, 22 bp, Artificial Sequence
  chemically synthesized
cttgtgtcctcatttgacacac

SEQ ID NO: 70293 - DNA, 22 bp, Artificial Sequence
  chemically synthesized
ttgtgtcctcatttgacacact

SEQ ID NO: 70294 - DNA, 22 bp, Artificial Sequence
  chemically synthesized
gtgtcctcatttgacacactct

SEQ ID NO: 70295 - DNA, 22 bp, Artificial Sequence
  chemically synthesized
tgtcctcatttgacacactctg

SEQ ID NO: 70296 - DNA, 22 bp, Artificial Sequence
  chemically synthesized
atttgacacactctgtaaatta

SEQ ID NO: 70297 - DNA, 22 bp, Artificial Sequence
  chemically synthesized
gacacactctgtaaattacttg

SEQ ID NO: 70298 - DNA, 22 bp, Artificial Sequence
  chemically synthesized
acacactctgtaaattacttgc

SEQ ID NO: 70299 - DNA, 22 bp, Artificial Sequence
  chemically synthesized
tgtaaattacttgcaagaaaat

SEQ ID NO: 70300 - DNA, 22 bp, Artificial Sequence
  chemically synthesized
taaattacttgcaagaaaataa

SEQ ID NO: 70301 - DNA, 22 bp, Artificial Sequence
  chemically synthesized
cttgcaagaaaataacaggttt

SEQ ID NO: 70302 - DNA, 22 bp, Artificial Sequence
  chemically synthesized
gcaagaaaataacaggttttaa

SEQ ID NO: 70303 - DNA, 22 bp, Artificial Sequence
  chemically synthesized
caagaaaataacaggttttaag

SEQ ID NO: 70304 - DNA, 22 bp, Artificial Sequence
  chemically synthesized
taagagaaggccagtcagtctt

SEQ ID NO: 70305 - DNA, 22 bp, Artificial Sequence
  chemically synthesized
aagagaaggccagtcagtcttt

SEQ ID NO: 70306 - DNA, 22 bp, Artificial Sequence
  chemically synthesized
agagaaggccagtcagtctttt

SEQ ID NO: 70307 - DNA, 22 bp, Artificial Sequence
  chemically synthesized
tttcaggattatttctatgggc

SEQ ID NO: 70308 - DNA, 22 bp, Artificial Sequence
  chemically synthesized
ttcaggattatttctatgggca

SEQ ID NO: 70309 - DNA, 22 bp, Artificial Sequence
  chemically synthesized
tcaggattatttctatgggcat

SEQ ID NO: 70310 - DNA, 22 bp, Artificial Sequence
  chemically synthesized
caggattatttctatgggcatt

SEQ ID NO: 70311 - DNA, 22 bp, Artificial Sequence
  chemically synthesized
aggattatttctatgggcattc

SEQ ID NO: 70312 - DNA, 22 bp, Artificial Sequence
  chemically synthesized
tttctatgggcattctgatgcg

SEQ ID NO: 70313 - DNA, 22 bp, Artificial Sequence
  chemically synthesized
ctatgggcattctgatgcgtgt

SEQ ID NO: 70314 - DNA, 22 bp, Artificial Sequence
  chemically synthesized
tatgggcattctgatgcgtgta

SEQ ID NO: 70315 - DNA, 22 bp, Artificial Sequence
  chemically synthesized
tgggcattctgatgcgtgtatt

SEQ ID NO: 70316 - DNA, 22 bp, Artificial Sequence
  chemically synthesized
tgatgcgtgtattataccctaa

SEQ ID NO: 70317 - DNA, 22 bp, Artificial Sequence
  chemically synthesized
atgcgtgtattataccctaaag

SEQ ID NO: 70318 - DNA, 22 bp, Artificial Sequence
  chemically synthesized
taccctaaaggaacataaagta

SEQ ID NO: 70319 - DNA, 22 bp, Artificial Sequence
  chemically synthesized
aaggaacataaagtacttacta

SEQ ID NO: 70320 - DNA, 22 bp, Artificial Sequence
  chemically synthesized
actatattaaaatagacatatc

SEQ ID NO: 70321 - DNA, 22 bp, Artificial Sequence
  chemically synthesized
ctatattaaaatagacatatct

SEQ ID NO: 70322 - DNA, 22 bp, Artificial Sequence
  chemically synthesized
tattaaaatagacatatctcaa

SEQ ID NO: 70323 - DNA, 22 bp, Artificial Sequence
  chemically synthesized
aaatagacatatctcaaaccct

SEQ ID NO: 70324 - DNA, 22 bp, Artificial Sequence
  chemically synthesized
aaaccctggacatagttttaag

SEQ ID NO: 70325 - DNA, 22 bp, Artificial Sequence
  chemically synthesized
gacatagttttaaggctttcca

SEQ ID NO: 70326 - DNA, 22 bp, Artificial Sequence
  chemically synthesized
taaggctttccagtttagaata

SEQ ID NO: 70327 - DNA, 22 bp, Artificial Sequence
  chemically synthesized
aaggctttccagtttagaatag

SEQ ID NO: 70328 - DNA, 22 bp, Artificial Sequence
  chemically synthesized
aggctttccagtttagaatagt

SEQ ID NO: 70329 - DNA, 22 bp, Artificial Sequence
  chemically synthesized
tccagtttagaatagttttcaa

SEQ ID NO: 70330 - DNA, 22 bp, Artificial Sequence
  chemically synthesized
ccagtttagaatagttttcaag

SEQ ID NO: 70331 - DNA, 22 bp, Artificial Sequence
  chemically synthesized
cagtttagaatagttttcaaga

SEQ ID NO: 70332 - DNA, 22 bp, Artificial Sequence
  chemically synthesized
agaatagttttcaagaaatgga

SEQ ID NO: 70333 - DNA, 22 bp, Artificial Sequence
  chemically synthesized
gaatagttttcaagaaatggaa

SEQ ID NO: 70334 - DNA, 22 bp, Artificial Sequence
  chemically synthesized
tcaagaaatggaaggtgttttc

SEQ ID NO: 70335 - DNA, 22 bp, Artificial Sequence
  chemically synthesized
caagaaatggaaggtgttttca

SEQ ID NO: 70336 - DNA, 22 bp, Artificial Sequence
  chemically synthesized
aagaaatggaaggtgttttcag

SEQ ID NO: 70337 - DNA, 22 bp, Artificial Sequence
  chemically synthesized
tcagtctgatgttaaaaactta

SEQ ID NO: 70338 - DNA, 22 bp, Artificial Sequence
  chemically synthesized
cagtctgatgttaaaaacttac

SEQ ID NO: 70339 - DNA, 22 bp, Artificial Sequence
  chemically synthesized
agtctgatgttaaaaacttact

SEQ ID NO: 70340 - DNA, 22 bp, Artificial Sequence
  chemically synthesized
atgttaaaaacttactccatct

SEQ ID NO: 70341 - DNA, 22 bp, Artificial Sequence
  chemically synthesized
aaaacttactccatctcttagc

SEQ ID NO: 70342 - DNA, 22 bp, Artificial Sequence
  chemically synthesized
actccatctcttagcagaaatc

SEQ ID NO: 70343 - DNA, 22 bp, Artificial Sequence
  chemically synthesized
ctccatctcttagcagaaatcc

SEQ ID NO: 70344 - DNA, 22 bp, Artificial Sequence
  chemically synthesized
catctcttagcagaaatccatt

SEQ ID NO: 70345 - DNA, 22 bp, Artificial Sequence
  chemically synthesized
ttagcagaaatccattcaaaca

SEQ ID NO: 70346 - DNA, 22 bp, Artificial Sequence
  chemically synthesized
agcagaaatccattcaaacata

SEQ ID NO: 70347 - DNA, 22 bp, Artificial Sequence
  chemically synthesized
gcagaaatccattcaaacataa

SEQ ID NO: 70348 - DNA, 22 bp, Artificial Sequence
  chemically synthesized
aaacataagtgaaaaaacttgc

SEQ ID NO: 70349 - DNA, 22 bp, Artificial Sequence
  chemically synthesized
gctggtaatagcatcttaaact

SEQ ID NO: 70350 - DNA, 22 bp, Artificial Sequence
  chemically synthesized
ctggtaatagcatcttaaactt

SEQ ID NO: 70351 - DNA, 22 bp, Artificial Sequence
  chemically synthesized
gtaatagcatcttaaactttta

SEQ ID NO: 70352 - DNA, 22 bp, Artificial Sequence
  chemically synthesized
aaacttttatttcctttaaatt

SEQ ID NO: 70353 - DNA, 22 bp, Artificial Sequence
  chemically synthesized
aacttttatttcctttaaattt

SEQ ID NO: 70354 - DNA, 22 bp, Artificial Sequence
  chemically synthesized
ttatttcctttaaattttttgc

SEQ ID NO: 70355 - DNA, 22 bp, Artificial Sequence
  chemically synthesized
tatttcctttaaattttttgct

SEQ ID NO: 70356 - DNA, 22 bp, Artificial Sequence
  chemically synthesized
atttcctttaaattttttgctg

SEQ ID NO: 70357 - DNA, 22 bp, Artificial Sequence
  chemically synthesized
tttcctttaaattttttgctgt

SEQ ID NO: 70358 - DNA, 22 bp, Artificial Sequence
  chemically synthesized
cctttaaattttttgctgttct

SEQ ID NO: 70359 - DNA, 22 bp, Artificial Sequence
  chemically synthesized
ctttaaattttttgctgttctt

SEQ ID NO: 70360 - DNA, 22 bp, Artificial Sequence
  chemically synthesized
taaattttttgctgttcttgtt

SEQ ID NO: 70361 - DNA, 22 bp, Artificial Sequence
  chemically synthesized
aaattttttgctgttcttgttg

SEQ ID NO: 70362 - DNA, 22 bp, Artificial Sequence
  chemically synthesized
aattttttgctgttcttgttgt

SEQ ID NO: 70363 - DNA, 22 bp, Artificial Sequence
  chemically synthesized
tttgctgttcttgttgtctaaa

SEQ ID NO: 70364 - DNA, 22 bp, Artificial Sequence
  chemically synthesized
ttgctgttcttgttgtctaaaa

SEQ ID NO: 70365 - DNA, 22 bp, Artificial Sequence
  chemically synthesized
tgctgttcttgttgtctaaaag

SEQ ID NO: 70366 - DNA, 22 bp, Artificial Sequence
  chemically synthesized
gctgttcttgttgtctaaaagt

SEQ ID NO: 70367 - DNA, 22 bp, Artificial Sequence
  chemically synthesized
ctgttcttgttgtctaaaagtt

SEQ ID NO: 70368 - DNA, 22 bp, Artificial Sequence
  chemically synthesized
ttcttgttgtctaaaagttctt

SEQ ID NO: 70369 - DNA, 22 bp, Artificial Sequence
  chemically synthesized
ttgttgtctaaaagttcttttc

SEQ ID NO: 70370 - DNA, 22 bp, Artificial Sequence
  chemically synthesized
gttgtctaaaagttcttttcta

SEQ ID NO: 70371 - DNA, 22 bp, Artificial Sequence
  chemically synthesized
ttgtctaaaagttcttttctat

SEQ ID NO: 70372 - DNA, 22 bp, Artificial Sequence
  chemically synthesized
tctaaaagttcttttctattct

SEQ ID NO: 70373 - DNA, 22 bp, Artificial Sequence
  chemically synthesized
aaagttcttttctattctccca

SEQ ID NO: 70374 - DNA, 22 bp, Artificial Sequence
  chemically synthesized
ttttctattctcccatccttgc

SEQ ID NO: 70375 - DNA, 22 bp, Artificial Sequence
  chemically synthesized
ttctattctcccatccttgctt

SEQ ID NO: 70376 - DNA, 22 bp, Artificial Sequence
  chemically synthesized
tctattctcccatccttgcttt

SEQ ID NO: 70377 - DNA, 22 bp, Artificial Sequence
  chemically synthesized
ctattctcccatccttgcttta

SEQ ID NO: 70378 - DNA, 22 bp, Artificial Sequence
  chemically synthesized
tattctcccatccttgctttat

SEQ ID NO: 70379 - DNA, 22 bp, Artificial Sequence
  chemically synthesized
ttctcccatccttgctttatct

SEQ ID NO: 70380 - DNA, 22 bp, Artificial Sequence
  chemically synthesized
tcccatccttgctttatcttag

SEQ ID NO: 70381 - DNA, 22 bp, Artificial Sequence
  chemically synthesized
ccatccttgctttatcttagaa

SEQ ID NO: 70382 - DNA, 22 bp, Artificial Sequence
  chemically synthesized
gctttatcttagaacataatgt

SEQ ID NO: 70383 - DNA, 22 bp, Artificial Sequence
  chemically synthesized
ctttatcttagaacataatgta

SEQ ID NO: 70384 - DNA, 22 bp, Artificial Sequence
  chemically synthesized
tatcttagaacataatgtaaaa

SEQ ID NO: 70385 - DNA, 22 bp, Artificial Sequence
  chemically synthesized
atcttagaacataatgtaaaaa

SEQ ID NO: 70386 - DNA, 22 bp, Artificial Sequence
  chemically synthesized
tcttagaacataatgtaaaaaa

SEQ ID NO: 70387 - DNA, 22 bp, Artificial Sequence
  chemically synthesized
agaacataatgtaaaaaagatt

SEQ ID NO: 70388 - DNA, 22 bp, Artificial Sequence
  chemically synthesized
gaacataatgtaaaaaagattt

SEQ ID NO: 70389 - DNA, 22 bp, Artificial Sequence
  chemically synthesized
ttttaaaaaaaatcagctcttt

SEQ ID NO: 70390 - DNA, 22 bp, Artificial Sequence
  chemically synthesized
tttaaaaaaaatcagctctttg

SEQ ID NO: 70391 - DNA, 22 bp, Artificial Sequence
  chemically synthesized
ttaaaaaaaatcagctctttgg

SEQ ID NO: 70392 - DNA, 22 bp, Artificial Sequence
  chemically synthesized
taaaaaaaatcagctctttggt

SEQ ID NO: 70393 - DNA, 22 bp, Artificial Sequence
  chemically synthesized
aaaaaaaatcagctctttggtt

SEQ ID NO: 70394 - DNA, 22 bp, Artificial Sequence
  chemically synthesized
aaaaaaatcagctctttggttt

SEQ ID NO: 70395 - DNA, 22 bp, Artificial Sequence
  chemically synthesized
tttggtttccatgtaagagtct

SEQ ID NO: 70396 - DNA, 22 bp, Artificial Sequence
  chemically synthesized
tggtttccatgtaagagtcttt

SEQ ID NO: 70397 - DNA, 22 bp, Artificial Sequence
  chemically synthesized
ggtttccatgtaagagtctttt

SEQ ID NO: 70398 - DNA, 22 bp, Artificial Sequence
  chemically synthesized
gtttccatgtaagagtcttttc

SEQ ID NO: 70399 - DNA, 22 bp, Artificial Sequence
  chemically synthesized
ccatgtaagagtcttttctcat

SEQ ID NO: 70400 - DNA, 22 bp, Artificial Sequence
  chemically synthesized
catgtaagagtcttttctcata

SEQ ID NO: 70401 - DNA, 22 bp, Artificial Sequence
  chemically synthesized
ttctcataacaaaataacccca

SEQ ID NO: 70402 - DNA, 22 bp, Artificial Sequence
  chemically synthesized
tctcataacaaaataaccccac

SEQ ID NO: 70403 - DNA, 22 bp, Artificial Sequence
  chemically synthesized
ctcataacaaaataaccccact

SEQ ID NO: 70404 - DNA, 22 bp, Artificial Sequence
  chemically synthesized
tcataacaaaataaccccactt

SEQ ID NO: 70405 - DNA, 22 bp, Artificial Sequence
  chemically synthesized
ataacaaaataaccccactttt

SEQ ID NO: 70406 - DNA, 22 bp, Artificial Sequence
  chemically synthesized
ttgaaatctaaaaatctggaaa

SEQ ID NO: 70407 - DNA, 22 bp, Artificial Sequence
  chemically synthesized
tgaaatctaaaaatctggaaac

SEQ ID NO: 70408 - DNA, 22 bp, Artificial Sequence
  chemically synthesized
gaaatctaaaaatctggaaaca

SEQ ID NO: 70409 - DNA, 22 bp, Artificial Sequence
  chemically synthesized
aaatctaaaaatctggaaacaa

SEQ ID NO: 70410 - DNA, 22 bp, Artificial Sequence
  chemically synthesized
aaaatctggaaacaaaggcatc

SEQ ID NO: 70411 - DNA, 22 bp, Artificial Sequence
  chemically synthesized
gaaacaaaggcatcaggttttg

SEQ ID NO: 70412 - DNA, 22 bp, Artificial Sequence
  chemically synthesized
tgttttgttttgttttgttttg

SEQ ID NO: 70413 - DNA, 22 bp, Artificial Sequence
  chemically synthesized
gttttgttttgttttgttttgt

SEQ ID NO: 70414 - DNA, 22 bp, Artificial Sequence
  chemically synthesized
ttttgttttgttttgttttgtt

SEQ ID NO: 70415 - DNA, 22 bp, Artificial Sequence
  chemically synthesized
tgttttgttttgttttgtttaa

SEQ ID NO: 70416 - DNA, 22 bp, Artificial Sequence
  chemically synthesized
gttttgttttgttttgtttaaa

SEQ ID NO: 70417 - DNA, 22 bp, Artificial Sequence
  chemically synthesized
ttttgttttgttttgtttaaaa

SEQ ID NO: 70418 - DNA, 22 bp, Artificial Sequence
  chemically synthesized
tgttttgttttgtttaaaaaag

SEQ ID NO: 70419 - DNA, 22 bp, Artificial Sequence
  chemically synthesized
gttttgttttgtttaaaaaaga

SEQ ID NO: 70420 - DNA, 22 bp, Artificial Sequence
  chemically synthesized
ttttgttttgtttaaaaaagag

SEQ ID NO: 70421 - DNA, 22 bp, Artificial Sequence
  chemically synthesized
tgttttgtttaaaaaagaggga

SEQ ID NO: 70422 - DNA, 22 bp, Artificial Sequence
  chemically synthesized
gttttgtttaaaaaagagggag

SEQ ID NO: 70423 - DNA, 22 bp, Artificial Sequence
  chemically synthesized
ttttgtttaaaaaagagggaga

SEQ ID NO: 70424 - DNA, 22 bp, Artificial Sequence
  chemically synthesized
tgtttaaaaaagagggagaaaa

SEQ ID NO: 70425 - DNA, 22 bp, Artificial Sequence
  chemically synthesized
gtttaaaaaagagggagaaaaa

SEQ ID NO: 70426 - DNA, 22 bp, Artificial Sequence
  chemically synthesized
tttaaaaaagagggagaaaaaa

SEQ ID NO: 70427 - DNA, 22 bp, Artificial Sequence
  chemically synthesized
aaaaaagagggagaaaaaaaga

SEQ ID NO: 70428 - DNA, 22 bp, Artificial Sequence
  chemically synthesized
aaaaagagggagaaaaaaagag

SEQ ID NO: 70429 - DNA, 22 bp, Artificial Sequence
  chemically synthesized
ggggtgtagccagacatagtga

SEQ ID NO: 70430 - DNA, 22 bp, Artificial Sequence
  chemically synthesized
tggaatcagccactgatttcct

SEQ ID NO: 70431 - DNA, 22 bp, Artificial Sequence
  chemically synthesized
ggaatcagccactgatttcctg

SEQ ID NO: 70432 - DNA, 22 bp, Artificial Sequence
  chemically synthesized
gaatcagccactgatttcctga

SEQ ID NO: 70433 - DNA, 22 bp, Artificial Sequence
  chemically synthesized
atttcctgagatgcatagtggt

SEQ ID NO: 70434 - DNA, 22 bp, Artificial Sequence
  chemically synthesized
cctgagatgcatagtggtttgc

SEQ ID NO: 70435 - DNA, 22 bp, Artificial Sequence
  chemically synthesized
ctgagatgcatagtggtttgcc

SEQ ID NO: 70436 - DNA, 22 bp, Artificial Sequence
  chemically synthesized
agatgcatagtggtttgccttg

SEQ ID NO: 70437 - DNA, 22 bp, Artificial Sequence
  chemically synthesized
gccttgtggttctgagatccca

SEQ ID NO: 70438 - DNA, 22 bp, Artificial Sequence
  chemically synthesized
ccttgtggttctgagatcccag

SEQ ID NO: 70439 - DNA, 22 bp, Artificial Sequence
  chemically synthesized
gtggttctgagatcccaggaac

SEQ ID NO: 70440 - DNA, 22 bp, Artificial Sequence
  chemically synthesized
tggttctgagatcccaggaacc

SEQ ID NO: 70441 - DNA, 22 bp, Artificial Sequence
  chemically synthesized
tgagatcccaggaaccctagat

SEQ ID NO: 70442 - DNA, 22 bp, Artificial Sequence
  chemically synthesized
agatcccaggaaccctagatgc

SEQ ID NO: 70443 - DNA, 22 bp, Artificial Sequence
  chemically synthesized
gatgctacagattactttaggt

SEQ ID NO: 70444 - DNA, 22 bp, Artificial Sequence
  chemically synthesized
cagattactttaggtgttttga

SEQ ID NO: 70445 - DNA, 22 bp, Artificial Sequence
  chemically synthesized
ctttaggtgttttgatagggtc

SEQ ID NO: 70446 - DNA, 22 bp, Artificial Sequence
  chemically synthesized
taggtgttttgatagggtcttc

SEQ ID NO: 70447 - DNA, 22 bp, Artificial Sequence
  chemically synthesized
aggtgttttgatagggtcttcc

SEQ ID NO: 70448 - DNA, 22 bp, Artificial Sequence
  chemically synthesized
ggtgttttgatagggtcttcct

SEQ ID NO: 70449 - DNA, 22 bp, Artificial Sequence
  chemically synthesized
tgatagggtcttcctggatgac

SEQ ID NO: 70450 - DNA, 22 bp, Artificial Sequence
  chemically synthesized
gatagggtcttcctggatgaca

SEQ ID NO: 70451 - DNA, 22 bp, Artificial Sequence
  chemically synthesized
atagggtcttcctggatgacag

SEQ ID NO: 70452 - DNA, 22 bp, Artificial Sequence
  chemically synthesized
cctggatgacagcaaataaggg

SEQ ID NO: 70453 - DNA, 22 bp, Artificial Sequence
  chemically synthesized
ctggatgacagcaaataagggc

SEQ ID NO: 70454 - DNA, 22 bp, Artificial Sequence
  chemically synthesized
gatgacagcaaataagggcggg

SEQ ID NO: 70455 - DNA, 22 bp, Artificial Sequence
  chemically synthesized
caattatcttctgaccagccag

SEQ ID NO: 70456 - DNA, 22 bp, Artificial Sequence
  chemically synthesized
aattatcttctgaccagccagt

SEQ ID NO: 70457 - DNA, 22 bp, Artificial Sequence
  chemically synthesized
tcttctgaccagccagttaggt

SEQ ID NO: 70458 - DNA, 22 bp, Artificial Sequence
  chemically synthesized
ctgaccagccagttaggtctat

SEQ ID NO: 70459 - DNA, 22 bp, Artificial Sequence
  chemically synthesized
tgaccagccagttaggtctatt

SEQ ID NO: 70460 - DNA, 22 bp, Artificial Sequence
  chemically synthesized
accagccagttaggtctatttt

SEQ ID NO: 70461 - DNA, 22 bp, Artificial Sequence
  chemically synthesized
ggtctattttaaaaatccttag

SEQ ID NO: 70462 - DNA, 22 bp, Artificial Sequence
  chemically synthesized
ttttaaaaatccttagaaatct

SEQ ID NO: 70463 - DNA, 22 bp, Artificial Sequence
  chemically synthesized
taaaaatccttagaaatctgtg

SEQ ID NO: 70464 - DNA, 22 bp, Artificial Sequence
  chemically synthesized
aaaaatccttagaaatctgtgt

SEQ ID NO: 70465 - DNA, 22 bp, Artificial Sequence
  chemically synthesized
aaaatccttagaaatctgtgtt

SEQ ID NO: 70466 - DNA, 22 bp, Artificial Sequence
  chemically synthesized
agaaatctgtgttgtcactttt

SEQ ID NO: 70467 - DNA, 22 bp, Artificial Sequence
  chemically synthesized
gaaatctgtgttgtcactttta

SEQ ID NO: 70468 - DNA, 22 bp, Artificial Sequence
  chemically synthesized
tgttgtcacttttacaaatact

SEQ ID NO: 70469 - DNA, 22 bp, Artificial Sequence
  chemically synthesized
tcacttttacaaatactgcatg

SEQ ID NO: 70470 - DNA, 22 bp, Artificial Sequence
  chemically synthesized
ttacaaatactgcatgttgcag

SEQ ID NO: 70471 - DNA, 22 bp, Artificial Sequence
  chemically synthesized
tacaaatactgcatgttgcagc

SEQ ID NO: 70472 - DNA, 22 bp, Artificial Sequence
  chemically synthesized
acaaatactgcatgttgcagca

SEQ ID NO: 70473 - DNA, 22 bp, Artificial Sequence
  chemically synthesized
caaatactgcatgttgcagcat

SEQ ID NO: 70474 - DNA, 22 bp, Artificial Sequence
  chemically synthesized
catgttgcagcatctatttgct

SEQ ID NO: 70475 - DNA, 22 bp, Artificial Sequence
  chemically synthesized
cagcatctatttgctttactaa

SEQ ID NO: 70476 - DNA, 22 bp, Artificial Sequence
  chemically synthesized
tttgctttactaaacacatacc

SEQ ID NO: 70477 - DNA, 22 bp, Artificial Sequence
  chemically synthesized
gctttactaaacacatacctct

SEQ ID NO: 70478 - DNA, 22 bp, Artificial Sequence
  chemically synthesized
ctttactaaacacatacctctg

SEQ ID NO: 70479 - DNA, 22 bp, Artificial Sequence
  chemically synthesized
tactaaacacatacctctgtga

SEQ ID NO: 70480 - DNA, 22 bp, Artificial Sequence
  chemically synthesized
actaaacacatacctctgtgat

SEQ ID NO: 70481 - DNA, 22 bp, Artificial Sequence
  chemically synthesized
ctaaacacatacctctgtgata

SEQ ID NO: 70482 - DNA, 22 bp, Artificial Sequence
  chemically synthesized
aacacatacctctgtgatatcg

SEQ ID NO: 70483 - DNA, 22 bp, Artificial Sequence
  chemically synthesized
tgtgatatcgtgtccctgttcc

SEQ ID NO: 70484 - DNA, 22 bp, Artificial Sequence
  chemically synthesized
tgatatcgtgtccctgttccca

SEQ ID NO: 70485 - DNA, 22 bp, Artificial Sequence
  chemically synthesized
ttcccagtgtagatgaatgaat

SEQ ID NO: 70486 - DNA, 22 bp, Artificial Sequence
  chemically synthesized
ccagtgtagatgaatgaatacg

SEQ ID NO: 70487 - DNA, 22 bp, Artificial Sequence
  chemically synthesized
ttcttatttttgtaaaaaacca

SEQ ID NO: 70488 - DNA, 22 bp, Artificial Sequence
  chemically synthesized
ttatttttgtaaaaaaccaaaa

SEQ ID NO: 70489 - DNA, 22 bp, Artificial Sequence
  chemically synthesized
atttttgtaaaaaaccaaaaca

SEQ ID NO: 70490 - DNA, 22 bp, Artificial Sequence
  chemically synthesized
tttttgtaaaaaaccaaaacaa

SEQ ID NO: 70491 - DNA, 22 bp, Artificial Sequence
  chemically synthesized
ttgtaaaaaaccaaaacaaaag

SEQ ID NO: 70492 - DNA, 22 bp, Artificial Sequence
  chemically synthesized
tgtaaaaaaccaaaacaaaagc

SEQ ID NO: 70493 - DNA, 22 bp, Artificial Sequence
  chemically synthesized
gtaaaaaaccaaaacaaaagcc

SEQ ID NO: 70494 - DNA, 22 bp, Artificial Sequence
  chemically synthesized
taaaaaaccaaaacaaaagccg

SEQ ID NO: 70495 - DNA, 22 bp, Artificial Sequence
  chemically synthesized
tgttgtcttcttgtggtagcat

SEQ ID NO: 70496 - DNA, 22 bp, Artificial Sequence
  chemically synthesized
ttgtcttcttgtggtagcattt

SEQ ID NO: 70497 - DNA, 22 bp, Artificial Sequence
  chemically synthesized
tcttcttgtggtagcatttttt

SEQ ID NO: 70498 - DNA, 22 bp, Artificial Sequence
  chemically synthesized
cttgtggtagcattttttgtcg

SEQ ID NO: 70499 - DNA, 22 bp, Artificial Sequence
  chemically synthesized
ttgtggtagcattttttgtcgc

SEQ ID NO: 70500 - DNA, 22 bp, Artificial Sequence
  chemically synthesized
gtggtagcattttttgtcgctc

SEQ ID NO: 70501 - DNA, 22 bp, Artificial Sequence
  chemically synthesized
tggtagcattttttgtcgctca

SEQ ID NO: 70502 - DNA, 22 bp, Artificial Sequence
  chemically synthesized
tttgtcgctcagttcttatgcc

SEQ ID NO: 70503 - DNA, 22 bp, Artificial Sequence
  chemically synthesized
ttgtcgctcagttcttatgccc

SEQ ID NO: 70504 - DNA, 22 bp, Artificial Sequence
  chemically synthesized
tgtcgctcagttcttatgccct

SEQ ID NO: 70505 - DNA, 22 bp, Artificial Sequence
  chemically synthesized
gtcgctcagttcttatgcccta

SEQ ID NO: 70506 - DNA, 22 bp, Artificial Sequence
  chemically synthesized
tcgctcagttcttatgccctag

SEQ ID NO: 70507 - DNA, 22 bp, Artificial Sequence
  chemically synthesized
agttcttatgccctagtgcctg

SEQ ID NO: 70508 - DNA, 22 bp, Artificial Sequence
  chemically synthesized
ttatgccctagtgcctgtgagg

SEQ ID NO: 70509 - DNA, 22 bp, Artificial Sequence
  chemically synthesized
atgccctagtgcctgtgaggtg

SEQ ID NO: 70510 - DNA, 22 bp, Artificial Sequence
  chemically synthesized
tgccctagtgcctgtgaggtgg

SEQ ID NO: 70511 - DNA, 22 bp, Artificial Sequence
  chemically synthesized
gtgcctgtgaggtggccttttc

SEQ ID NO: 70512 - DNA, 22 bp, Artificial Sequence
  chemically synthesized
tgaggtggccttttcatgtcat

SEQ ID NO: 70513 - DNA, 22 bp, Artificial Sequence
  chemically synthesized
ttcatgtcatgccttttatctg

SEQ ID NO: 70514 - DNA, 22 bp, Artificial Sequence
  chemically synthesized
tcatgtcatgccttttatctga

SEQ ID NO: 70515 - DNA, 22 bp, Artificial Sequence
  chemically synthesized
catgtcatgccttttatctgag

SEQ ID NO: 70516 - DNA, 22 bp, Artificial Sequence
  chemically synthesized
atgtcatgccttttatctgagg

SEQ ID NO: 70517 - DNA, 22 bp, Artificial Sequence
  chemically synthesized
ttatctgaggcaagaatagttt

SEQ ID NO: 70518 - DNA, 22 bp, Artificial Sequence
  chemically synthesized
tatctgaggcaagaatagtttt

SEQ ID NO: 70519 - DNA, 22 bp, Artificial Sequence
  chemically synthesized
atctgaggcaagaatagtttta

SEQ ID NO: 70520 - DNA, 22 bp, Artificial Sequence
  chemically synthesized
tctgaggcaagaatagttttat

SEQ ID NO: 70521 - DNA, 22 bp, Artificial Sequence
  chemically synthesized
aggcaagaatagttttatcttt

SEQ ID NO: 70522 - DNA, 22 bp, Artificial Sequence
  chemically synthesized
tatctttctaaagtataaagaa

SEQ ID NO: 70523 - DNA, 22 bp, Artificial Sequence
  chemically synthesized
atctttctaaagtataaagaaa

SEQ ID NO: 70524 - DNA, 22 bp, Artificial Sequence
  chemically synthesized
tctttctaaagtataaagaaag

SEQ ID NO: 70525 - DNA, 22 bp, Artificial Sequence
  chemically synthesized
tctaaagtataaagaaagtcaa

SEQ ID NO: 70526 - DNA, 22 bp, Artificial Sequence
  chemically synthesized
ctaaagtataaagaaagtcaat

SEQ ID NO: 70527 - DNA, 22 bp, Artificial Sequence
  chemically synthesized
taaagtataaagaaagtcaatg

SEQ ID NO: 70528 - DNA, 22 bp, Artificial Sequence
  chemically synthesized
aagtataaagaaagtcaatgtt

SEQ ID NO: 70529 - DNA, 22 bp, Artificial Sequence
  chemically synthesized
tctgaaaagccagtttgggtgg

SEQ ID NO: 70530 - DNA, 22 bp, Artificial Sequence
  chemically synthesized
ctgaaaagccagtttgggtggg

SEQ ID NO: 70531 - DNA, 22 bp, Artificial Sequence
  chemically synthesized
tgaaaagccagtttgggtggga

SEQ ID NO: 70532 - DNA, 22 bp, Artificial Sequence
  chemically synthesized
aaaagccagtttgggtgggaag

SEQ ID NO: 70533 - DNA, 22 bp, Artificial Sequence
  chemically synthesized
gggtgggaaggagagagtgggg

SEQ ID NO: 70534 - DNA, 22 bp, Artificial Sequence
  chemically synthesized
ggtgggaaggagagagtggggc

SEQ ID NO: 70535 - DNA, 22 bp, Artificial Sequence
  chemically synthesized
gaggaatccactgagaaaggat

SEQ ID NO: 70536 - DNA, 22 bp, Artificial Sequence
  chemically synthesized
agaaaggatgttggagaatatt

SEQ ID NO: 70537 - DNA, 22 bp, Artificial Sequence
  chemically synthesized
gagaatattacataggaggtgg

SEQ ID NO: 70538 - DNA, 22 bp, Artificial Sequence
  chemically synthesized
cataggaggtggggtggggtgg

SEQ ID NO: 70539 - DNA, 22 bp, Artificial Sequence
  chemically synthesized
gagaacttgatgtttgtcactg

SEQ ID NO: 70540 - DNA, 22 bp, Artificial Sequence
  chemically synthesized
agaacttgatgtttgtcactga

SEQ ID NO: 70541 - DNA, 22 bp, Artificial Sequence
  chemically synthesized
gatgtttgtcactgaacttaga

SEQ ID NO: 70542 - DNA, 22 bp, Artificial Sequence
  chemically synthesized
atgtttgtcactgaacttagaa

SEQ ID NO: 70543 - DNA, 22 bp, Artificial Sequence
  chemically synthesized
gtcactgaacttagaaaagata

SEQ ID NO: 70544 - DNA, 22 bp, Artificial Sequence
  chemically synthesized
tcactgaacttagaaaagatat

SEQ ID NO: 70545 - DNA, 22 bp, Artificial Sequence
  chemically synthesized
aacttagaaaagatatactgta

SEQ ID NO: 70546 - DNA, 22 bp, Artificial Sequence
  chemically synthesized
agaaaagatatactgtatgtgt

SEQ ID NO: 70547 - DNA, 22 bp, Artificial Sequence
  chemically synthesized
gaaaagatatactgtatgtgtt

SEQ ID NO: 70548 - DNA, 22 bp, Artificial Sequence
  chemically synthesized
tatgtgttttggattaggtttc

SEQ ID NO: 70549 - DNA, 22 bp, Artificial Sequence
  chemically synthesized
tggattaggtttctccaaaact

SEQ ID NO: 70550 - DNA, 22 bp, Artificial Sequence
  chemically synthesized
ggattaggtttctccaaaactg

SEQ ID NO: 70551 - DNA, 22 bp, Artificial Sequence
  chemically synthesized
gattaggtttctccaaaactga

SEQ ID NO: 70552 - DNA, 22 bp, Artificial Sequence
  chemically synthesized
ggtttctccaaaactgaatcca

SEQ ID NO: 70553 - DNA, 22 bp, Artificial Sequence
  chemically synthesized
ctccaaaactgaatccaaaatg

SEQ ID NO: 70554 - DNA, 22 bp, Artificial Sequence
  chemically synthesized
tccaaaactgaatccaaaatgc

SEQ ID NO: 70555 - DNA, 22 bp, Artificial Sequence
  chemically synthesized
caaaactgaatccaaaatgctg

SEQ ID NO: 70556 - DNA, 22 bp, Artificial Sequence
  chemically synthesized
aatccaaaatgctgctcaagac

SEQ ID NO: 70557 - DNA, 22 bp, Artificial Sequence
  chemically synthesized
ctcaagacagatagaaataatt

SEQ ID NO: 70558 - DNA, 22 bp, Artificial Sequence
  chemically synthesized
aagacagatagaaataattccc

SEQ ID NO: 70559 - DNA, 22 bp, Artificial Sequence
  chemically synthesized
cccagtgccatgccagctttag

SEQ ID NO: 70560 - DNA, 22 bp, Artificial Sequence
  chemically synthesized
tagatgtggtgacttcgactcc

SEQ ID NO: 70561 - DNA, 22 bp, Artificial Sequence
  chemically synthesized
agatgtggtgacttcgactcca

SEQ ID NO: 70562 - DNA, 22 bp, Artificial Sequence
  chemically synthesized
gatgtggtgacttcgactccac

SEQ ID NO: 70563 - DNA, 22 bp, Artificial Sequence
  chemically synthesized
cgactccaccctattaaatgtc

SEQ ID NO: 70564 - DNA, 22 bp, Artificial Sequence
  chemically synthesized
gactccaccctattaaatgtcc

SEQ ID NO: 70565 - DNA, 22 bp, Artificial Sequence
  chemically synthesized
caccctattaaatgtccataaa

SEQ ID NO: 70566 - DNA, 22 bp, Artificial Sequence
  chemically synthesized
ttaaatgtccataaaacctctg

SEQ ID NO: 70567 - DNA, 22 bp, Artificial Sequence
  chemically synthesized
aatgtccataaaacctctgtgt

SEQ ID NO: 70568 - DNA, 22 bp, Artificial Sequence
  chemically synthesized
tgtgtgtccctattactctttt

SEQ ID NO: 70569 - DNA, 22 bp, Artificial Sequence
  chemically synthesized
tgtgtccctattactcttttat

SEQ ID NO: 70570 - DNA, 22 bp, Artificial Sequence
  chemically synthesized
ttactcttttattaggagctat

SEQ ID NO: 70571 - DNA, 22 bp, Artificial Sequence
  chemically synthesized
ctcttttattaggagctatgag

SEQ ID NO: 70572 - DNA, 22 bp, Artificial Sequence
  chemically synthesized
ttttattaggagctatgagtgc

SEQ ID NO: 70573 - DNA, 22 bp, Artificial Sequence
  chemically synthesized
ttattaggagctatgagtgcaa

SEQ ID NO: 70574 - DNA, 22 bp, Artificial Sequence
  chemically synthesized
tattaggagctatgagtgcaac

SEQ ID NO: 70575 - DNA, 22 bp, Artificial Sequence
  chemically synthesized
attaggagctatgagtgcaact

SEQ ID NO: 70576 - DNA, 22 bp, Artificial Sequence
  chemically synthesized
ttaggagctatgagtgcaactg

SEQ ID NO: 70577 - DNA, 22 bp, Artificial Sequence
  chemically synthesized
ggagctatgagtgcaactgtgt

SEQ ID NO: 70578 - DNA, 22 bp, Artificial Sequence
  chemically synthesized
tgagtgcaactgtgtaggtttt

SEQ ID NO: 70579 - DNA, 22 bp, Artificial Sequence
  chemically synthesized
tgtaggttttatatacagtatt

SEQ ID NO: 70580 - DNA, 22 bp, Artificial Sequence
  chemically synthesized
tatatacagtattcattttaat

SEQ ID NO: 70581 - DNA, 22 bp, Artificial Sequence
  chemically synthesized
atatacagtattcattttaatt

SEQ ID NO: 70582 - DNA, 22 bp, Artificial Sequence
  chemically synthesized
tatacagtattcattttaattt

SEQ ID NO: 70583 - DNA, 22 bp, Artificial Sequence
  chemically synthesized
attttaatttctcagtatatgc

SEQ ID NO: 70584 - DNA, 22 bp, Artificial Sequence
  chemically synthesized
taatttctcagtatatgctgct

SEQ ID NO: 70585 - DNA, 22 bp, Artificial Sequence
  chemically synthesized
aatttctcagtatatgctgctc

SEQ ID NO: 70586 - DNA, 22 bp, Artificial Sequence
  chemically synthesized
atttctcagtatatgctgctct

SEQ ID NO: 70587 - DNA, 22 bp, Artificial Sequence
  chemically synthesized
ctcagtatatgctgctcttagc

SEQ ID NO: 70588 - DNA, 22 bp, Artificial Sequence
  chemically synthesized
tcagtatatgctgctcttagcg

SEQ ID NO: 70589 - DNA, 22 bp, Artificial Sequence
  chemically synthesized
agtatatgctgctcttagcgta

SEQ ID NO: 70590 - DNA, 22 bp, Artificial Sequence
  chemically synthesized
ctcttagcgtaattaggttttg

SEQ ID NO: 70591 - DNA, 22 bp, Artificial Sequence
  chemically synthesized
ttagcgtaattaggttttgcat

SEQ ID NO: 70592 - DNA, 22 bp, Artificial Sequence
  chemically synthesized
agcgtaattaggttttgcatcc

SEQ ID NO: 70593 - DNA, 22 bp, Artificial Sequence
  chemically synthesized
gcgtaattaggttttgcatcct

SEQ ID NO: 70594 - DNA, 22 bp, Artificial Sequence
  chemically synthesized
ggttttgcatcctgacagacag

SEQ ID NO: 70595 - DNA, 22 bp, Artificial Sequence
  chemically synthesized
tgcatcctgacagacagaatta

SEQ ID NO: 70596 - DNA, 22 bp, Artificial Sequence
  chemically synthesized
gcatcctgacagacagaattaa

SEQ ID NO: 70597 - DNA, 22 bp, Artificial Sequence
  chemically synthesized
catcctgacagacagaattaat

SEQ ID NO: 70598 - DNA, 22 bp, Artificial Sequence
  chemically synthesized
acagacagaattaatggtggat

SEQ ID NO: 70599 - DNA, 22 bp, Artificial Sequence
  chemically synthesized
atggtggatactgtacacttgt

SEQ ID NO: 70600 - DNA, 22 bp, Artificial Sequence
  chemically synthesized
tacacttgtctgttcaaatttc

SEQ ID NO: 70601 - DNA, 22 bp, Artificial Sequence
  chemically synthesized
gtctgttcaaatttcttaaatc

SEQ ID NO: 70602 - DNA, 22 bp, Artificial Sequence
  chemically synthesized
tctgttcaaatttcttaaatca

SEQ ID NO: 70603 - DNA, 22 bp, Artificial Sequence
  chemically synthesized
ttcaaatttcttaaatcaaatg

SEQ ID NO: 70604 - DNA, 22 bp, Artificial Sequence
  chemically synthesized
aaatttcttaaatcaaatgggg

SEQ ID NO: 70605 - DNA, 22 bp, Artificial Sequence
  chemically synthesized
cttaaatcaaatggggaatggg

SEQ ID NO: 70606 - DNA, 22 bp, Artificial Sequence
  chemically synthesized
ttaaatcaaatggggaatgggg

SEQ ID NO: 70607 - DNA, 22 bp, Artificial Sequence
  chemically synthesized
aaatcaaatggggaatggggag

SEQ ID NO: 70608 - DNA, 22 bp, Artificial Sequence
  chemically synthesized
aatcaaatggggaatggggagg

SEQ ID NO: 70609 - DNA, 22 bp, Artificial Sequence
  chemically synthesized
gtgataaatcacagattatgtt

SEQ ID NO: 70610 - DNA, 22 bp, Artificial Sequence
  chemically synthesized
tgtttgatttacatggtcccaa

SEQ ID NO: 70611 - DNA, 22 bp, Artificial Sequence
  chemically synthesized
gatttacatggtcccaaagtta

SEQ ID NO: 70612 - DNA, 22 bp, Artificial Sequence
  chemically synthesized
atttacatggtcccaaagttaa

SEQ ID NO: 70613 - DNA, 22 bp, Artificial Sequence
  chemically synthesized
acatggtcccaaagttaaataa

SEQ ID NO: 70614 - DNA, 22 bp, Artificial Sequence
  chemically synthesized
catggtcccaaagttaaataaa

SEQ ID NO: 70615 - DNA, 22 bp, Artificial Sequence
  chemically synthesized
aataaatttactgggagatggg

SEQ ID NO: 70616 - DNA, 22 bp, Artificial Sequence
  chemically synthesized
actgggagatgggttcttcagg

SEQ ID NO: 70617 - DNA, 22 bp, Artificial Sequence
  chemically synthesized
ctgggagatgggttcttcaggt

SEQ ID NO: 70618 - DNA, 22 bp, Artificial Sequence
  chemically synthesized
ggagatgggttcttcaggttac

SEQ ID NO: 70619 - DNA, 22 bp, Artificial Sequence
  chemically synthesized
ttcaggttacttagtctcctga

SEQ ID NO: 70620 - DNA, 22 bp, Artificial Sequence
  chemically synthesized
caggttacttagtctcctgact

SEQ ID NO: 70621 - DNA, 22 bp, Artificial Sequence
  chemically synthesized
aggttacttagtctcctgactt

SEQ ID NO: 70622 - DNA, 22 bp, Artificial Sequence
  chemically synthesized
cttagtctcctgacttattgac

SEQ ID NO: 70623 - DNA, 22 bp, Artificial Sequence
  chemically synthesized
agtctcctgacttattgacgcc

SEQ ID NO: 70624 - DNA, 22 bp, Artificial Sequence
  chemically synthesized
gtctcctgacttattgacgcct

SEQ ID NO: 70625 - DNA, 22 bp, Artificial Sequence
  chemically synthesized
ctgacttattgacgccttctga

SEQ ID NO: 70626 - DNA, 22 bp, Artificial Sequence
  chemically synthesized
acttattgacgccttctgataa

SEQ ID NO: 70627 - DNA, 22 bp, Artificial Sequence
  chemically synthesized
attgacgccttctgataaaata

SEQ ID NO: 70628 - DNA, 22 bp, Artificial Sequence
  chemically synthesized
ttgacgccttctgataaaatat

SEQ ID NO: 70629 - DNA, 22 bp, Artificial Sequence
  chemically synthesized
acgccttctgataaaatattat

SEQ ID NO: 70630 - DNA, 22 bp, Artificial Sequence
  chemically synthesized
ctgataaaatattatttctgaa

SEQ ID NO: 70631 - DNA, 22 bp, Artificial Sequence
  chemically synthesized
tgataaaatattatttctgaag

SEQ ID NO: 70632 - DNA, 22 bp, Artificial Sequence
  chemically synthesized
ataaaatattatttctgaagct

SEQ ID NO: 70633 - DNA, 22 bp, Artificial Sequence
  chemically synthesized
tttctgaagctgatgaacaata

SEQ ID NO: 70634 - DNA, 22 bp, Artificial Sequence
  chemically synthesized
ctgaagctgatgaacaatagaa

SEQ ID NO: 70635 - DNA, 22 bp, Artificial Sequence
  chemically synthesized
tgaagctgatgaacaatagaaa

SEQ ID NO: 70636 - DNA, 22 bp, Artificial Sequence
  chemically synthesized
aagctgatgaacaatagaaaca

SEQ ID NO: 70637 - DNA, 22 bp, Artificial Sequence
  chemically synthesized
atgaacaatagaaacatgagaa

SEQ ID NO: 70638 - DNA, 22 bp, Artificial Sequence
  chemically synthesized
gccaacatgatatcacttataa

SEQ ID NO: 70639 - DNA, 22 bp, Artificial Sequence
  chemically synthesized
ataaatgatattttgtatccag

SEQ ID NO: 70640 - DNA, 22 bp, Artificial Sequence
  chemically synthesized
taaatgatattttgtatccaga

SEQ ID NO: 70641 - DNA, 22 bp, Artificial Sequence
  chemically synthesized
tgtatccagaactctaaaattt

SEQ ID NO: 70642 - DNA, 22 bp, Artificial Sequence
  chemically synthesized
gtatccagaactctaaaattta

SEQ ID NO: 70643 - DNA, 22 bp, Artificial Sequence
  chemically synthesized
tatccagaactctaaaatttaa

SEQ ID NO: 70644 - DNA, 22 bp, Artificial Sequence
  chemically synthesized
taaaatttaaaatcttaatata

SEQ ID NO: 70645 - DNA, 22 bp, Artificial Sequence
  chemically synthesized
aaatttaaaatcttaatataaa

SEQ ID NO: 70646 - DNA, 22 bp, Artificial Sequence
  chemically synthesized
aaaatcttaatataaaataaca

SEQ ID NO: 70647 - DNA, 22 bp, Artificial Sequence
  chemically synthesized
aaatcttaatataaaataacat

SEQ ID NO: 70648 - DNA, 22 bp, Artificial Sequence
  chemically synthesized
aatataaaataacatgcacatt

SEQ ID NO: 70649 - DNA, 22 bp, Artificial Sequence
  chemically synthesized
atataaaataacatgcacattt

SEQ ID NO: 70650 - DNA, 22 bp, Artificial Sequence
  chemically synthesized
ccaatagtaagatgaattcatg

SEQ ID NO: 70651 - DNA, 22 bp, Artificial Sequence
  chemically synthesized
caatagtaagatgaattcatga

SEQ ID NO: 70652 - DNA, 22 bp, Artificial Sequence
  chemically synthesized
atgatcttttttttttaaatga

SEQ ID NO: 70653 - DNA, 22 bp, Artificial Sequence
  chemically synthesized
ttttttttaaatgaggaactac

SEQ ID NO: 70654 - DNA, 22 bp, Artificial Sequence
  chemically synthesized
tttttttaaatgaggaactact

SEQ ID NO: 70655 - DNA, 22 bp, Artificial Sequence
  chemically synthesized
ttttttaaatgaggaactacta

SEQ ID NO: 70656 - DNA, 22 bp, Artificial Sequence
  chemically synthesized
tttttaaatgaggaactactaa

SEQ ID NO: 70657 - DNA, 22 bp, Artificial Sequence
  chemically synthesized
ttttaaatgaggaactactaag

SEQ ID NO: 70658 - DNA, 22 bp, Artificial Sequence
  chemically synthesized
tttaaatgaggaactactaaga

SEQ ID NO: 70659 - DNA, 22 bp, Artificial Sequence
  chemically synthesized
ttaaatgaggaactactaagaa

SEQ ID NO: 70660 - DNA, 22 bp, Artificial Sequence
  chemically synthesized
taaatgaggaactactaagaac

SEQ ID NO: 70661 - DNA, 22 bp, Artificial Sequence
  chemically synthesized
aaatgaggaactactaagaaca

SEQ ID NO: 70662 - DNA, 22 bp, Artificial Sequence
  chemically synthesized
aatgaggaactactaagaacat

SEQ ID NO: 70663 - DNA, 22 bp, Artificial Sequence
  chemically synthesized
ctaagaacattaatgtctctta

SEQ ID NO: 70664 - DNA, 22 bp, Artificial Sequence
  chemically synthesized
agaacattaatgtctcttaaaa

SEQ ID NO: 70665 - DNA, 22 bp, Artificial Sequence
  chemically synthesized
atgtctcttaaaatcctcaagt

SEQ ID NO: 70666 - DNA, 22 bp, Artificial Sequence
  chemically synthesized
ttaaaatcctcaagtaagtttt

SEQ ID NO: 70667 - DNA, 22 bp, Artificial Sequence
  chemically synthesized
aaaatcctcaagtaagtttttg

SEQ ID NO: 70668 - DNA, 22 bp, Artificial Sequence
  chemically synthesized
aaatcctcaagtaagtttttgt

SEQ ID NO: 70669 - DNA, 22 bp, Artificial Sequence
  chemically synthesized
aagtaagtttttgtaacaggct

SEQ ID NO: 70670 - DNA, 22 bp, Artificial Sequence
  chemically synthesized
ttgtaacaggcttgacgtgctg

SEQ ID NO: 70671 - DNA, 22 bp, Artificial Sequence
  chemically synthesized
tgtaacaggcttgacgtgctga

SEQ ID NO: 70672 - DNA, 22 bp, Artificial Sequence
  chemically synthesized
gtaacaggcttgacgtgctgat

SEQ ID NO: 70673 - DNA, 22 bp, Artificial Sequence
  chemically synthesized
taacaggcttgacgtgctgatg

SEQ ID NO: 70674 - DNA, 22 bp, Artificial Sequence
  chemically synthesized
gacgtgctgatggaatgttctc

SEQ ID NO: 70675 - DNA, 22 bp, Artificial Sequence
  chemically synthesized
acgtgctgatggaatgttctct

SEQ ID NO: 70676 - DNA, 22 bp, Artificial Sequence
  chemically synthesized
atggaatgttctctacatacct

SEQ ID NO: 70677 - DNA, 22 bp, Artificial Sequence
  chemically synthesized
tctacatacctgaactgatgct

SEQ ID NO: 70678 - DNA, 22 bp, Artificial Sequence
  chemically synthesized
tacatacctgaactgatgctta

SEQ ID NO: 70679 - DNA, 22 bp, Artificial Sequence
  chemically synthesized
catacctgaactgatgcttaaa

SEQ ID NO: 70680 - DNA, 22 bp, Artificial Sequence
  chemically synthesized
aactgatgcttaaaatgttctt

SEQ ID NO: 70681 - DNA, 22 bp, Artificial Sequence
  chemically synthesized
atgcttaaaatgttctttttaa

SEQ ID NO: 70682 - DNA, 22 bp, Artificial Sequence
  chemically synthesized
aaaatgttctttttaatcttca

SEQ ID NO: 70683 - DNA, 22 bp, Artificial Sequence
  chemically synthesized
aaatgttctttttaatcttcat

SEQ ID NO: 70684 - DNA, 22 bp, Artificial Sequence
  chemically synthesized
tttttaatcttcatttgagaac

SEQ ID NO: 70685 - DNA, 22 bp, Artificial Sequence
  chemically synthesized
tttaatcttcatttgagaacaa

SEQ ID NO: 70686 - DNA, 22 bp, Artificial Sequence
  chemically synthesized
ttaatcttcatttgagaacaac

SEQ ID NO: 70687 - DNA, 22 bp, Artificial Sequence
  chemically synthesized
taatcttcatttgagaacaact

SEQ ID NO: 70688 - DNA, 22 bp, Artificial Sequence
  chemically synthesized
aatcttcatttgagaacaactt

SEQ ID NO: 70689 - DNA, 22 bp, Artificial Sequence
  chemically synthesized
atcttcatttgagaacaactta

SEQ ID NO: 70690 - DNA, 22 bp, Artificial Sequence
  chemically synthesized
catttgagaacaacttaataaa

SEQ ID NO: 70691 - DNA, 22 bp, Artificial Sequence
  chemically synthesized
atttgagaacaacttaataaac

SEQ ID NO: 70692 - DNA, 22 bp, Artificial Sequence
  chemically synthesized
gagaacaacttaataaacagga

SEQ ID NO: 70693 - DNA, 22 bp, Artificial Sequence
  chemically synthesized
agaacaacttaataaacaggaa

SEQ ID NO: 70694 - DNA, 22 bp, Artificial Sequence
  chemically synthesized
aataaacaggaataccgcaaat

SEQ ID NO: 70695 - DNA, 22 bp, Artificial Sequence
  chemically synthesized
ataaacaggaataccgcaaatt

SEQ ID NO: 70696 - DNA, 22 bp, Artificial Sequence
  chemically synthesized
tatttctcacagattttaaacc

SEQ ID NO: 70697 - DNA, 22 bp, Artificial Sequence
  chemically synthesized
tttctcacagattttaaaccag

SEQ ID NO: 70698 - DNA, 22 bp, Artificial Sequence
  chemically synthesized
ctcacagattttaaaccagaaa

SEQ ID NO: 70699 - DNA, 22 bp, Artificial Sequence
  chemically synthesized
tcacagattttaaaccagaaac

SEQ ID NO: 70700 - DNA, 22 bp, Artificial Sequence
  chemically synthesized
acagattttaaaccagaaactc

SEQ ID NO: 70701 - DNA, 22 bp, Artificial Sequence
  chemically synthesized
taaaccagaaactcttccagtg

SEQ ID NO: 70702 - DNA, 22 bp, Artificial Sequence
  chemically synthesized
aaaccagaaactcttccagtgc

SEQ ID NO: 70703 - DNA, 22 bp, Artificial Sequence
  chemically synthesized
aaccagaaactcttccagtgcc

SEQ ID NO: 70704 - DNA, 22 bp, Artificial Sequence
  chemically synthesized
ttccagtgcctatattacctcc

SEQ ID NO: 70705 - DNA, 22 bp, Artificial Sequence
  chemically synthesized
ccagtgcctatattacctcctt

SEQ ID NO: 70706 - DNA, 22 bp, Artificial Sequence
  chemically synthesized
cagtgcctatattacctccttc

SEQ ID NO: 70707 - DNA, 22 bp, Artificial Sequence
  chemically synthesized
tattacctccttcctgaaccca

SEQ ID NO: 70708 - DNA, 22 bp, Artificial Sequence
  chemically synthesized
cctccttcctgaacccatttgc

SEQ ID NO: 70709 - DNA, 22 bp, Artificial Sequence
  chemically synthesized
cttcctgaacccatttgctatc

SEQ ID NO: 70710 - DNA, 22 bp, Artificial Sequence
  chemically synthesized
cctgaacccatttgctatcctc

SEQ ID NO: 70711 - DNA, 22 bp, Artificial Sequence
  chemically synthesized
ctgaacccatttgctatcctct

SEQ ID NO: 70712 - DNA, 22 bp, Artificial Sequence
  chemically synthesized
aacccatttgctatcctctctt

SEQ ID NO: 70713 - DNA, 22 bp, Artificial Sequence
  chemically synthesized
gctatcctctctttgtttagga

SEQ ID NO: 70714 - DNA, 22 bp, Artificial Sequence
  chemically synthesized
ctatcctctctttgtttaggac

SEQ ID NO: 70715 - DNA, 22 bp, Artificial Sequence
  chemically synthesized
tcctctctttgtttaggaccta

SEQ ID NO: 70716 - DNA, 22 bp, Artificial Sequence
  chemically synthesized
tctttgtttaggacctacaaaa

SEQ ID NO: 70717 - DNA, 22 bp, Artificial Sequence
  chemically synthesized
tttgtttaggacctacaaaaag

SEQ ID NO: 70718 - DNA, 22 bp, Artificial Sequence
  chemically synthesized
tgtttaggacctacaaaaaggc

SEQ ID NO: 70719 - DNA, 22 bp, Artificial Sequence
  chemically synthesized
gtttaggacctacaaaaaggct

SEQ ID NO: 70720 - DNA, 22 bp, Artificial Sequence
  chemically synthesized
tttaggacctacaaaaaggctg

SEQ ID NO: 70721 - DNA, 22 bp, Artificial Sequence
  chemically synthesized
aggacctacaaaaaggctggaa

SEQ ID NO: 70722 - DNA, 22 bp, Artificial Sequence
  chemically synthesized
ggacctacaaaaaggctggaac

SEQ ID NO: 70723 - DNA, 22 bp, Artificial Sequence
  chemically synthesized
caaaaaggctggaaccaacaca

SEQ ID NO: 70724 - DNA, 22 bp, Artificial Sequence
  chemically synthesized
gaaccaacacattacaaaggtt

SEQ ID NO: 70725 - DNA, 22 bp, Artificial Sequence
  chemically synthesized
caaaggttgctaagaagtgagg

SEQ ID NO: 70726 - DNA, 22 bp, Artificial Sequence
  chemically synthesized
ctaagaagtgaggtgaacacag

SEQ ID NO: 70727 - DNA, 22 bp, Artificial Sequence
  chemically synthesized
agaagtgaggtgaacacagttc

SEQ ID NO: 70728 - DNA, 22 bp, Artificial Sequence
  chemically synthesized
ttcatttgcactggccatggca

SEQ ID NO: 70729 - DNA, 22 bp, Artificial Sequence
  chemically synthesized
catttgcactggccatggcaga

SEQ ID NO: 70730 - DNA, 22 bp, Artificial Sequence
  chemically synthesized
atttgcactggccatggcagaa

SEQ ID NO: 70731 - DNA, 22 bp, Artificial Sequence
  chemically synthesized
gcactggccatggcagaaagtg

SEQ ID NO: 70732 - DNA, 22 bp, Artificial Sequence
  chemically synthesized
cactggccatggcagaaagtgt

SEQ ID NO: 70733 - DNA, 22 bp, Artificial Sequence
  chemically synthesized
gccatggcagaaagtgtgaagt

SEQ ID NO: 70734 - DNA, 22 bp, Artificial Sequence
  chemically synthesized
agtttttcccagggcattctgt

SEQ ID NO: 70735 - DNA, 22 bp, Artificial Sequence
  chemically synthesized
ttcccagggcattctgtagata

SEQ ID NO: 70736 - DNA, 22 bp, Artificial Sequence
  chemically synthesized
tcccagggcattctgtagatat

SEQ ID NO: 70737 - DNA, 22 bp, Artificial Sequence
  chemically synthesized
cccagggcattctgtagatata

SEQ ID NO: 70738 - DNA, 22 bp, Artificial Sequence
  chemically synthesized
ccagggcattctgtagatatag

SEQ ID NO: 70739 - DNA, 22 bp, Artificial Sequence
  chemically synthesized
tgtagatatagaactgtttatt

SEQ ID NO: 70740 - DNA, 22 bp, Artificial Sequence
  chemically synthesized
tagatatagaactgtttattta

SEQ ID NO: 70741 - DNA, 22 bp, Artificial Sequence
  chemically synthesized
tttatttaaataccatttttgt

SEQ ID NO: 70742 - DNA, 22 bp, Artificial Sequence
  chemically synthesized
atttaaataccatttttgtata

SEQ ID NO: 70743 - DNA, 22 bp, Artificial Sequence
  chemically synthesized
tttaaataccatttttgtatat

SEQ ID NO: 70744 - DNA, 22 bp, Artificial Sequence
  chemically synthesized
aaataccatttttgtatatgca

SEQ ID NO: 70745 - DNA, 22 bp, Artificial Sequence
  chemically synthesized
aataccatttttgtatatgcaa

SEQ ID NO: 70746 - DNA, 22 bp, Artificial Sequence
  chemically synthesized
ttgtatatgcaataagtacata

SEQ ID NO: 70747 - DNA, 22 bp, Artificial Sequence
  chemically synthesized
tgtatatgcaataagtacatat

SEQ ID NO: 70748 - DNA, 22 bp, Artificial Sequence
  chemically synthesized
gtatatgcaataagtacatatt

SEQ ID NO: 70749 - DNA, 22 bp, Artificial Sequence
  chemically synthesized
tatatgcaataagtacatattg

SEQ ID NO: 70750 - DNA, 22 bp, Artificial Sequence
  chemically synthesized
tatataatcataatgctagaag

SEQ ID NO: 70751 - DNA, 22 bp, Artificial Sequence
  chemically synthesized
gaagtgagaacttgaaaggaag

SEQ ID NO: 70752 - DNA, 22 bp, Artificial Sequence
  chemically synthesized
gaaaggaagtggcgggagatgg

SEQ ID NO: 70753 - DNA, 22 bp, Artificial Sequence
  chemically synthesized
aaaggaagtggcgggagatggc

SEQ ID NO: 70754 - DNA, 22 bp, Artificial Sequence
  chemically synthesized
aggtataattccaattggagaa

SEQ ID NO: 70755 - DNA, 22 bp, Artificial Sequence
  chemically synthesized
ggtataattccaattggagaaa

SEQ ID NO: 70756 - DNA, 22 bp, Artificial Sequence
  chemically synthesized
caattggagaaataaggaaatg

SEQ ID NO: 70757 - DNA, 22 bp, Artificial Sequence
  chemically synthesized
gagaaataaggaaatgaggtgg

SEQ ID NO: 70758 - DNA, 22 bp, Artificial Sequence
  chemically synthesized
attcacagacacagtttgctga

SEQ ID NO: 70759 - DNA, 22 bp, Artificial Sequence
  chemically synthesized
ttcacagacacagtttgctgaa

SEQ ID NO: 70760 - DNA, 22 bp, Artificial Sequence
  chemically synthesized
acagacacagtttgctgaaagg

SEQ ID NO: 70761 - DNA, 22 bp, Artificial Sequence
  chemically synthesized
gctgaaaggtactgggattatt

SEQ ID NO: 70762 - DNA, 22 bp, Artificial Sequence
  chemically synthesized
ctgaaaggtactgggattattt

SEQ ID NO: 70763 - DNA, 22 bp, Artificial Sequence
  chemically synthesized
aaaggtactgggattatttcgg

SEQ ID NO: 70764 - DNA, 22 bp, Artificial Sequence
  chemically synthesized
ggattatttcgggccttcctga

SEQ ID NO: 70765 - DNA, 22 bp, Artificial Sequence
  chemically synthesized
tttcgggccttcctgaaaagga

SEQ ID NO: 70766 - DNA, 22 bp, Artificial Sequence
  chemically synthesized
cgggccttcctgaaaaggagtt

SEQ ID NO: 70767 - DNA, 22 bp, Artificial Sequence
  chemically synthesized
gggccttcctgaaaaggagttg

SEQ ID NO: 70768 - DNA, 22 bp, Artificial Sequence
  chemically synthesized
cctgaaaaggagttgagaagcc

SEQ ID NO: 70769 - DNA, 22 bp, Artificial Sequence
  chemically synthesized
ctgaaaaggagttgagaagcct

SEQ ID NO: 70770 - DNA, 22 bp, Artificial Sequence
  chemically synthesized
aaaaggagttgagaagcctcag

SEQ ID NO: 70771 - DNA, 22 bp, Artificial Sequence
  chemically synthesized
agaagcctcaggccccatcctc

SEQ ID NO: 70772 - DNA, 22 bp, Artificial Sequence
  chemically synthesized
aggccccatcctctcctgcttg

SEQ ID NO: 70773 - DNA, 22 bp, Artificial Sequence
  chemically synthesized
tcctgcttgtagtactttgctc

SEQ ID NO: 70774 - DNA, 22 bp, Artificial Sequence
  chemically synthesized
ctgcttgtagtactttgctcac

SEQ ID NO: 70775 - DNA, 22 bp, Artificial Sequence
  chemically synthesized
cttgtagtactttgctcacaga

SEQ ID NO: 70776 - DNA, 22 bp, Artificial Sequence
  chemically synthesized
gtagtactttgctcacagagac

SEQ ID NO: 70777 - DNA, 22 bp, Artificial Sequence
  chemically synthesized
tagtactttgctcacagagact

SEQ ID NO: 70778 - DNA, 22 bp, Artificial Sequence
  chemically synthesized
tgctcacagagactgagggagg

SEQ ID NO: 70779 - DNA, 22 bp, Artificial Sequence
  chemically synthesized
gctcacagagactgagggagga

SEQ ID NO: 70780 - DNA, 22 bp, Artificial Sequence
  chemically synthesized
ctcacagagactgagggaggaa

SEQ ID NO: 70781 - DNA, 22 bp, Artificial Sequence
  chemically synthesized
acagagactgagggaggaaata

SEQ ID NO: 70782 - DNA, 22 bp, Artificial Sequence
  chemically synthesized
agggaggaaatacagtgttttc

SEQ ID NO: 70783 - DNA, 22 bp, Artificial Sequence
  chemically synthesized
tcttgttttaagcctcttttcc

SEQ ID NO: 70784 - DNA, 22 bp, Artificial Sequence
  chemically synthesized
cttgttttaagcctcttttccc

SEQ ID NO: 70785 - DNA, 22 bp, Artificial Sequence
  chemically synthesized
ttgttttaagcctcttttcccc

SEQ ID NO: 70786 - DNA, 22 bp, Artificial Sequence
  chemically synthesized
gttttaagcctcttttccccct

SEQ ID NO: 70787 - DNA, 22 bp, Artificial Sequence
  chemically synthesized
ttttaagcctcttttccccctc

SEQ ID NO: 70788 - DNA, 22 bp, Artificial Sequence
  chemically synthesized
taagcctcttttccccctccgt

SEQ ID NO: 70789 - DNA, 22 bp, Artificial Sequence
  chemically synthesized
aagcctcttttccccctccgta

SEQ ID NO: 70790 - DNA, 22 bp, Artificial Sequence
  chemically synthesized
agcctcttttccccctccgtac

SEQ ID NO: 70791 - DNA, 22 bp, Artificial Sequence
  chemically synthesized
ttttccccctccgtacacacat

SEQ ID NO: 70792 - DNA, 22 bp, Artificial Sequence
  chemically synthesized
ttccccctccgtacacacatga

SEQ ID NO: 70793 - DNA, 22 bp, Artificial Sequence
  chemically synthesized
tccccctccgtacacacatgaa

SEQ ID NO: 70794 - DNA, 22 bp, Artificial Sequence
  chemically synthesized
ccccctccgtacacacatgaac

SEQ ID NO: 70795 - DNA, 22 bp, Artificial Sequence
  chemically synthesized
cccctccgtacacacatgaaca

SEQ ID NO: 70796 - DNA, 22 bp, Artificial Sequence
  chemically synthesized
cgtacacacatgaacatgactt

SEQ ID NO: 70797 - DNA, 22 bp, Artificial Sequence
  chemically synthesized
cttatgactgtgttgtaactgt

SEQ ID NO: 70798 - DNA, 22 bp, Artificial Sequence
  chemically synthesized
ttatgactgtgttgtaactgtg

SEQ ID NO: 70799 - DNA, 22 bp, Artificial Sequence
  chemically synthesized
atgactgtgttgtaactgtgtg

SEQ ID NO: 70800 - DNA, 22 bp, Artificial Sequence
  chemically synthesized
tgactgtgttgtaactgtgtgt

SEQ ID NO: 70801 - DNA, 22 bp, Artificial Sequence
  chemically synthesized
tgttgtaactgtgtgttcctca

SEQ ID NO: 70802 - DNA, 22 bp, Artificial Sequence
  chemically synthesized
taactgtgtgttcctcattacg

SEQ ID NO: 70803 - DNA, 22 bp, Artificial Sequence
  chemically synthesized
tgtgttcctcattacgattctg

SEQ ID NO: 70804 - DNA, 22 bp, Artificial Sequence
  chemically synthesized
ctcattacgattctgttactcc

SEQ ID NO: 70805 - DNA, 22 bp, Artificial Sequence
  chemically synthesized
attacgattctgttactccatt

SEQ ID NO: 70806 - DNA, 22 bp, Artificial Sequence
  chemically synthesized
cgattctgttactccattgtcc

SEQ ID NO: 70807 - DNA, 22 bp, Artificial Sequence
  chemically synthesized
tgttactccattgtccctgggc

SEQ ID NO: 70808 - DNA, 22 bp, Artificial Sequence
  chemically synthesized
ttactccattgtccctgggcct

SEQ ID NO: 70809 - DNA, 22 bp, Artificial Sequence
  chemically synthesized
ctccattgtccctgggcctggt

SEQ ID NO: 70810 - DNA, 22 bp, Artificial Sequence
  chemically synthesized
cattgtccctgggcctggtgtg

SEQ ID NO: 70811 - DNA, 22 bp, Artificial Sequence
  chemically synthesized
tccctgggcctggtgtgttcag

SEQ ID NO: 70812 - DNA, 22 bp, Artificial Sequence
  chemically synthesized
ggcctggtgtgttcaggaatgt

SEQ ID NO: 70813 - DNA, 22 bp, Artificial Sequence
  chemically synthesized
gtgtgttcaggaatgtacccat

SEQ ID NO: 70814 - DNA, 22 bp, Artificial Sequence
  chemically synthesized
aggaatgtacccatcccattct

SEQ ID NO: 70815 - DNA, 22 bp, Artificial Sequence
  chemically synthesized
tctttttttcagacaacttccc

SEQ ID NO: 70816 - DNA, 22 bp, Artificial Sequence
  chemically synthesized
tttttttcagacaacttcccat

SEQ ID NO: 70817 - DNA, 22 bp, Artificial Sequence
  chemically synthesized
tttttcagacaacttcccataa

SEQ ID NO: 70818 - DNA, 22 bp, Artificial Sequence
  chemically synthesized
ttttcagacaacttcccataaa

SEQ ID NO: 70819 - DNA, 22 bp, Artificial Sequence
  chemically synthesized
tttcagacaacttcccataaaa

SEQ ID NO: 70820 - DNA, 22 bp, Artificial Sequence
  chemically synthesized
ttcagacaacttcccataaaaa

SEQ ID NO: 70821 - DNA, 22 bp, Artificial Sequence
  chemically synthesized
tcagacaacttcccataaaaaa

SEQ ID NO: 70822 - DNA, 22 bp, Artificial Sequence
  chemically synthesized
cagacaacttcccataaaaaaa

SEQ ID NO: 70823 - DNA, 22 bp, Artificial Sequence
  chemically synthesized
agacaacttcccataaaaaaaa

SEQ ID NO: 70824 - DNA, 22 bp, Artificial Sequence
  chemically synthesized
cccataaaaaaaaaattgtggg

SEQ ID NO: 70825 - DNA, 22 bp, Artificial Sequence
  chemically synthesized
ccataaaaaaaaaattgtggga

SEQ ID NO: 70826 - DNA, 22 bp, Artificial Sequence
  chemically synthesized
tgggaactttgccgatatgagg

SEQ ID NO: 70827 - DNA, 22 bp, Artificial Sequence
  chemically synthesized
tgccgatatgaggatgggattg

SEQ ID NO: 70828 - DNA, 22 bp, Artificial Sequence
  chemically synthesized
gccgatatgaggatgggattgg

SEQ ID NO: 70829 - DNA, 22 bp, Artificial Sequence
  chemically synthesized
ccgatatgaggatgggattggc

SEQ ID NO: 70830 - DNA, 22 bp, Artificial Sequence
  chemically synthesized
gcagagttctctcaacctgctt

SEQ ID NO: 70831 - DNA, 22 bp, Artificial Sequence
  chemically synthesized
tctcaacctgcttggaaaaatg

SEQ ID NO: 70832 - DNA, 22 bp, Artificial Sequence
  chemically synthesized
tcaacctgcttggaaaaatgtt

SEQ ID NO: 70833 - DNA, 22 bp, Artificial Sequence
  chemically synthesized
aacctgcttggaaaaatgtttc

SEQ ID NO: 70834 - DNA, 22 bp, Artificial Sequence
  chemically synthesized
cttggaaaaatgtttcttaaaa

SEQ ID NO: 70835 - DNA, 22 bp, Artificial Sequence
  chemically synthesized
ggaaaaatgtttcttaaaagac

SEQ ID NO: 70836 - DNA, 22 bp, Artificial Sequence
  chemically synthesized
gaaaaatgtttcttaaaagact

SEQ ID NO: 70837 - DNA, 22 bp, Artificial Sequence
  chemically synthesized
cttaaaagactgctaactttta

SEQ ID NO: 70838 - DNA, 22 bp, Artificial Sequence
  chemically synthesized
ttaaaagactgctaacttttaa

SEQ ID NO: 70839 - DNA, 22 bp, Artificial Sequence
  chemically synthesized
aaaagactgctaacttttaaaa

SEQ ID NO: 70840 - DNA, 22 bp, Artificial Sequence
  chemically synthesized
aaagactgctaacttttaaaag

SEQ ID NO: 70841 - DNA, 22 bp, Artificial Sequence
  chemically synthesized
ctaacttttaaaaggcatgagc

SEQ ID NO: 70842 - DNA, 22 bp, Artificial Sequence
  chemically synthesized
acttttaaaaggcatgagccat

SEQ ID NO: 70843 - DNA, 22 bp, Artificial Sequence
  chemically synthesized
ttaaaaggcatgagccatctag

SEQ ID NO: 70844 - DNA, 22 bp, Artificial Sequence
  chemically synthesized
taaaaggcatgagccatctagc

SEQ ID NO: 70845 - DNA, 22 bp, Artificial Sequence
  chemically synthesized
aaaaggcatgagccatctagca

SEQ ID NO: 70846 - DNA, 22 bp, Artificial Sequence
  chemically synthesized
aaaggcatgagccatctagcag

SEQ ID NO: 70847 - DNA, 22 bp, Artificial Sequence
  chemically synthesized
gcagattttcctagttgtctcc

SEQ ID NO: 70848 - DNA, 22 bp, Artificial Sequence
  chemically synthesized
tcctagttgtctcctaaagccc

SEQ ID NO: 70849 - DNA, 22 bp, Artificial Sequence
  chemically synthesized
cctagttgtctcctaaagccct

SEQ ID NO: 70850 - DNA, 22 bp, Artificial Sequence
  chemically synthesized
ctagttgtctcctaaagccctg

SEQ ID NO: 70851 - DNA, 22 bp, Artificial Sequence
  chemically synthesized
gttgtctcctaaagccctgcat

SEQ ID NO: 70852 - DNA, 22 bp, Artificial Sequence
  chemically synthesized
tctcctaaagccctgcatattt

SEQ ID NO: 70853 - DNA, 22 bp, Artificial Sequence
  chemically synthesized
ctaaagccctgcatatttccca

SEQ ID NO: 70854 - DNA, 22 bp, Artificial Sequence
  chemically synthesized
aagccctgcatatttcccaata

SEQ ID NO: 70855 - DNA, 22 bp, Artificial Sequence
  chemically synthesized
catatttcccaatagaaaataa

SEQ ID NO: 70856 - DNA, 22 bp, Artificial Sequence
  chemically synthesized
cccaatagaaaataaacgaacc

SEQ ID NO: 70857 - DNA, 22 bp, Artificial Sequence
  chemically synthesized
ccaatagaaaataaacgaaccc

SEQ ID NO: 70858 - DNA, 22 bp, Artificial Sequence
  chemically synthesized
ttagagaaatggacatcagaac

SEQ ID NO: 70859 - DNA, 22 bp, Artificial Sequence
  chemically synthesized
gagaaatggacatcagaacaca

SEQ ID NO: 70860 - DNA, 22 bp, Artificial Sequence
  chemically synthesized
gtatgatgtgtatttactctag

SEQ ID NO: 70861 - DNA, 22 bp, Artificial Sequence
  chemically synthesized
actctagggctgctatagctat

SEQ ID NO: 70862 - DNA, 22 bp, Artificial Sequence
  chemically synthesized
ctctagggctgctatagctatg

SEQ ID NO: 70863 - DNA, 22 bp, Artificial Sequence
  chemically synthesized
tagggctgctatagctatgaac

SEQ ID NO: 70864 - DNA, 22 bp, Artificial Sequence
  chemically synthesized
gggctgctatagctatgaactg

SEQ ID NO: 70865 - DNA, 22 bp, Artificial Sequence
  chemically synthesized
ctatagctatgaactgtggaca

SEQ ID NO: 70866 - DNA, 22 bp, Artificial Sequence
  chemically synthesized
tagctatgaactgtggacatgg

SEQ ID NO: 70867 - DNA, 22 bp, Artificial Sequence
  chemically synthesized
tgaactgtggacatgggttgtc

SEQ ID NO: 70868 - DNA, 22 bp, Artificial Sequence
  chemically synthesized
tggacatgggttgtccggtctg

SEQ ID NO: 70869 - DNA, 22 bp, Artificial Sequence
  chemically synthesized
tccggtctgcacttctgcttgc

SEQ ID NO: 70870 - DNA, 22 bp, Artificial Sequence
  chemically synthesized
cacttctgcttgctggcatctc

SEQ ID NO: 70871 - DNA, 22 bp, Artificial Sequence
  chemically synthesized
ctgcttgctggcatctcgttat

SEQ ID NO: 70872 - DNA, 22 bp, Artificial Sequence
  chemically synthesized
tgcttgctggcatctcgttatc

SEQ ID NO: 70873 - DNA, 22 bp, Artificial Sequence
  chemically synthesized
cttgctggcatctcgttatccc

SEQ ID NO: 70874 - DNA, 22 bp, Artificial Sequence
  chemically synthesized
gctggcatctcgttatcccatt

SEQ ID NO: 70875 - DNA, 22 bp, Artificial Sequence
  chemically synthesized
ctggcatctcgttatcccatta

SEQ ID NO: 70876 - DNA, 22 bp, Artificial Sequence
  chemically synthesized
gcatctcgttatcccattagcc

SEQ ID NO: 70877 - DNA, 22 bp, Artificial Sequence
  chemically synthesized
gttatcccattagcccgctgtt

SEQ ID NO: 70878 - DNA, 22 bp, Artificial Sequence
  chemically synthesized
tcccattagcccgctgtttaat

SEQ ID NO: 70879 - DNA, 22 bp, Artificial Sequence
  chemically synthesized
gcccgctgtttaatttactaca

SEQ ID NO: 70880 - DNA, 22 bp, Artificial Sequence
  chemically synthesized
tttaatttactacatacagcac

SEQ ID NO: 70881 - DNA, 22 bp, Artificial Sequence
  chemically synthesized
aatttactacatacagcacgag

SEQ ID NO: 70882 - DNA, 22 bp, Artificial Sequence
  chemically synthesized
atttactacatacagcacgagg

SEQ ID NO: 70883 - DNA, 22 bp, Artificial Sequence
  chemically synthesized
actacatacagcacgaggccag

SEQ ID NO: 70884 - DNA, 22 bp, Artificial Sequence
  chemically synthesized
ctacatacagcacgaggccagt

SEQ ID NO: 70885 - DNA, 22 bp, Artificial Sequence
  chemically synthesized
catacagcacgaggccagtgac

SEQ ID NO: 70886 - DNA, 22 bp, Artificial Sequence
  chemically synthesized
agcctttaggggaatggggctg

SEQ ID NO: 70887 - DNA, 22 bp, Artificial Sequence
  chemically synthesized
taggggaatggggctgtttctc

SEQ ID NO: 70888 - DNA, 22 bp, Artificial Sequence
  chemically synthesized
aggggaatggggctgtttctct

SEQ ID NO: 70889 - DNA, 22 bp, Artificial Sequence
  chemically synthesized
ggggaatggggctgtttctctc

SEQ ID NO: 70890 - DNA, 22 bp, Artificial Sequence
  chemically synthesized
tttctctctctctctctctctt

SEQ ID NO: 70891 - DNA, 22 bp, Artificial Sequence
  chemically synthesized
ctctctctctctctctctttct

SEQ ID NO: 70892 - DNA, 22 bp, Artificial Sequence
  chemically synthesized
tctctctctctctctctttctc

SEQ ID NO: 70893 - DNA, 22 bp, Artificial Sequence
  chemically synthesized
tctctctctctctctttctctc

SEQ ID NO: 70894 - DNA, 22 bp, Artificial Sequence
  chemically synthesized
tctctctctctctttctctctc

SEQ ID NO: 70895 - DNA, 22 bp, Artificial Sequence
  chemically synthesized
tctctctctctttctctctctc

SEQ ID NO: 70896 - DNA, 22 bp, Artificial Sequence
  chemically synthesized
tctctctctttctctctctcta

SEQ ID NO: 70897 - DNA, 22 bp, Artificial Sequence
  chemically synthesized
tctctctttctctctctctatt

SEQ ID NO: 70898 - DNA, 22 bp, Artificial Sequence
  chemically synthesized
tctctttctctctctctatttc

SEQ ID NO: 70899 - DNA, 22 bp, Artificial Sequence
  chemically synthesized
tctttctctctctctatttccc

SEQ ID NO: 70900 - DNA, 22 bp, Artificial Sequence
  chemically synthesized
tttctctctctctatttcccag

SEQ ID NO: 70901 - DNA, 22 bp, Artificial Sequence
  chemically synthesized
tctctctctctatttcccagcg

SEQ ID NO: 70902 - DNA, 22 bp, Artificial Sequence
  chemically synthesized
ctctctctctatttcccagcgt

SEQ ID NO: 70903 - DNA, 22 bp, Artificial Sequence
  chemically synthesized
tctctctctatttcccagcgtc

SEQ ID NO: 70904 - DNA, 22 bp, Artificial Sequence
  chemically synthesized
tctctctatttcccagcgtcat

SEQ ID NO: 70905 - DNA, 22 bp, Artificial Sequence
  chemically synthesized
tctctatttcccagcgtcatct

SEQ ID NO: 70906 - DNA, 22 bp, Artificial Sequence
  chemically synthesized
tctatttcccagcgtcatctac

SEQ ID NO: 70907 - DNA, 22 bp, Artificial Sequence
  chemically synthesized
tatttcccagcgtcatctacgg

SEQ ID NO: 70908 - DNA, 22 bp, Artificial Sequence
  chemically synthesized
tttcccagcgtcatctacggtc

SEQ ID NO: 70909 - DNA, 22 bp, Artificial Sequence
  chemically synthesized
cccagcgtcatctacggtcatg

SEQ ID NO: 70910 - DNA, 22 bp, Artificial Sequence
  chemically synthesized
ccagcgtcatctacggtcatgg

SEQ ID NO: 70911 - DNA, 22 bp, Artificial Sequence
  chemically synthesized
cggtcatgggataccattaatt

SEQ ID NO: 70912 - DNA, 22 bp, Artificial Sequence
  chemically synthesized
attcctcccttccaaatgggaa

SEQ ID NO: 70913 - DNA, 22 bp, Artificial Sequence
  chemically synthesized
ctcccttccaaatgggaaagag

SEQ ID NO: 70914 - DNA, 22 bp, Artificial Sequence
  chemically synthesized
ccttccaaatgggaaagagacc

SEQ ID NO: 70915 - DNA, 22 bp, Artificial Sequence
  chemically synthesized
ccaaatgggaaagagaccaatc

SEQ ID NO: 70916 - DNA, 22 bp, Artificial Sequence
  chemically synthesized
caaatgggaaagagaccaatcc

SEQ ID NO: 70917 - DNA, 22 bp, Artificial Sequence
  chemically synthesized
acacgggtcattgtacttgaga

SEQ ID NO: 70918 - DNA, 22 bp, Artificial Sequence
  chemically synthesized
tacttgagaacctaaacttggc

SEQ ID NO: 70919 - DNA, 22 bp, Artificial Sequence
  chemically synthesized
gagaacctaaacttggctgaac

SEQ ID NO: 70920 - DNA, 22 bp, Artificial Sequence
  chemically synthesized
agaacctaaacttggctgaaca

SEQ ID NO: 70921 - DNA, 22 bp, Artificial Sequence
  chemically synthesized
aacttggctgaacacagctcga

SEQ ID NO: 70922 - DNA, 22 bp, Artificial Sequence
  chemically synthesized
ggctgaacacagctcgatggtt

SEQ ID NO: 70923 - DNA, 22 bp, Artificial Sequence
  chemically synthesized
gctgaacacagctcgatggttg

SEQ ID NO: 70924 - DNA, 22 bp, Artificial Sequence
  chemically synthesized
aacacagctcgatggttgatcc

SEQ ID NO: 70925 - DNA, 22 bp, Artificial Sequence
  chemically synthesized
gatggttgatccaaatacgttt

SEQ ID NO: 70926 - DNA, 22 bp, Artificial Sequence
  chemically synthesized
atccaaatacgtttttcctttc

SEQ ID NO: 70927 - DNA, 22 bp, Artificial Sequence
  chemically synthesized
ttcctttctgtaaagtggcaaa

SEQ ID NO: 70928 - DNA, 22 bp, Artificial Sequence
  chemically synthesized
tcctttctgtaaagtggcaaaa

SEQ ID NO: 70929 - DNA, 22 bp, Artificial Sequence
  chemically synthesized
cctttctgtaaagtggcaaaaa

SEQ ID NO: 70930 - DNA, 22 bp, Artificial Sequence
  chemically synthesized
ctttctgtaaagtggcaaaaac

SEQ ID NO: 70931 - DNA, 22 bp, Artificial Sequence
  chemically synthesized
tctgtaaagtggcaaaaactat

SEQ ID NO: 70932 - DNA, 22 bp, Artificial Sequence
  chemically synthesized
ctgtaaagtggcaaaaactatt

SEQ ID NO: 70933 - DNA, 22 bp, Artificial Sequence
  chemically synthesized
tgtaaagtggcaaaaactattt

SEQ ID NO: 70934 - DNA, 22 bp, Artificial Sequence
  chemically synthesized
taaagtggcaaaaactatttca

SEQ ID NO: 70935 - DNA, 22 bp, Artificial Sequence
  chemically synthesized
tttcaagggagcacgtgtatca

SEQ ID NO: 70936 - DNA, 22 bp, Artificial Sequence
  chemically synthesized
caagggagcacgtgtatcagat

SEQ ID NO: 70937 - DNA, 22 bp, Artificial Sequence
  chemically synthesized
aagggagcacgtgtatcagatc

SEQ ID NO: 70938 - DNA, 22 bp, Artificial Sequence
  chemically synthesized
tcatagggatggtagaaaaggc

SEQ ID NO: 70939 - DNA, 22 bp, Artificial Sequence
  chemically synthesized
catagggatggtagaaaaggca

SEQ ID NO: 70940 - DNA, 22 bp, Artificial Sequence
  chemically synthesized
atagggatggtagaaaaggcaa

SEQ ID NO: 70941 - DNA, 22 bp, Artificial Sequence
  chemically synthesized
agccatttccccaagtatcctc

SEQ ID NO: 70942 - DNA, 22 bp, Artificial Sequence
  chemically synthesized
ccccaagtatcctctaaagcgg

SEQ ID NO: 70943 - DNA, 22 bp, Artificial Sequence
  chemically synthesized
cccaagtatcctctaaagcggg

SEQ ID NO: 70944 - DNA, 22 bp, Artificial Sequence
  chemically synthesized
taaagcgggagcccctaaaccc

SEQ ID NO: 70945 - DNA, 22 bp, Artificial Sequence
  chemically synthesized
aagcgggagcccctaaacccat

SEQ ID NO: 70946 - DNA, 22 bp, Artificial Sequence
  chemically synthesized
aacccataggggggctgtgctt

SEQ ID NO: 70947 - DNA, 22 bp, Artificial Sequence
  chemically synthesized
tgcttttaaatagctgtgaacg

SEQ ID NO: 70948 - DNA, 22 bp, Artificial Sequence
  chemically synthesized
ttaaatagctgtgaacgtggta

SEQ ID NO: 70949 - DNA, 22 bp, Artificial Sequence
  chemically synthesized
taaatagctgtgaacgtggtac

SEQ ID NO: 70950 - DNA, 22 bp, Artificial Sequence
  chemically synthesized
aaatagctgtgaacgtggtaca

SEQ ID NO: 70951 - DNA, 22 bp, Artificial Sequence
  chemically synthesized
aatagctgtgaacgtggtacat

SEQ ID NO: 70952 - DNA, 22 bp, Artificial Sequence
  chemically synthesized
tgaacgtggtacatgcccatga

SEQ ID NO: 70953 - DNA, 22 bp, Artificial Sequence
  chemically synthesized
tgtctattagaatttgaatatt

SEQ ID NO: 70954 - DNA, 22 bp, Artificial Sequence
  chemically synthesized
gtctattagaatttgaatattg

SEQ ID NO: 70955 - DNA, 22 bp, Artificial Sequence
  chemically synthesized
tctattagaatttgaatattgg

SEQ ID NO: 70956 - DNA, 22 bp, Artificial Sequence
  chemically synthesized
ttagaatttgaatattggtagc

SEQ ID NO: 70957 - DNA, 22 bp, Artificial Sequence
  chemically synthesized
gaatttgaatattggtagcagg

SEQ ID NO: 70958 - DNA, 22 bp, Artificial Sequence
  chemically synthesized
gaatattggtagcaggttggac

SEQ ID NO: 70959 - DNA, 22 bp, Artificial Sequence
  chemically synthesized
aatattggtagcaggttggacg

SEQ ID NO: 70960 - DNA, 22 bp, Artificial Sequence
  chemically synthesized
gtagcaggttggacgaaagggt

SEQ ID NO: 70961 - DNA, 22 bp, Artificial Sequence
  chemically synthesized
gacgaaagggtttgattggggt

SEQ ID NO: 70962 - DNA, 22 bp, Artificial Sequence
  chemically synthesized
gattggggtatcagctaaaggg

SEQ ID NO: 70963 - DNA, 22 bp, Artificial Sequence
  chemically synthesized
attggggtatcagctaaagggg

SEQ ID NO: 70964 - DNA, 22 bp, Artificial Sequence
  chemically synthesized
gggtatcagctaaaggggcctc

SEQ ID NO: 70965 - DNA, 22 bp, Artificial Sequence
  chemically synthesized
aaggggcctcgacgacagtgac

SEQ ID NO: 70966 - DNA, 22 bp, Artificial Sequence
  chemically synthesized
gacgacagtgacttagcgctgg

SEQ ID NO: 70967 - DNA, 22 bp, Artificial Sequence
  chemically synthesized
agcgctggactgggaatgggat

SEQ ID NO: 70968 - DNA, 22 bp, Artificial Sequence
  chemically synthesized
gcgctggactgggaatgggatt

SEQ ID NO: 70969 - DNA, 22 bp, Artificial Sequence
  chemically synthesized
gactgggaatgggattccccag

SEQ ID NO: 70970 - DNA, 22 bp, Artificial Sequence
  chemically synthesized
ggaatgggattccccagaaccc

SEQ ID NO: 70971 - DNA, 22 bp, Artificial Sequence
  chemically synthesized
cccagaacccacctggacgcag

SEQ ID NO: 70972 - DNA, 22 bp, Artificial Sequence
  chemically synthesized
gacgcagcatgcccctcagccc

SEQ ID NO: 70973 - DNA, 22 bp, Artificial Sequence
  chemically synthesized
agcccaggtctccgctgctctg

SEQ ID NO: 70974 - DNA, 22 bp, Artificial Sequence
  chemically synthesized
cgctgctctgctcaggggtggg

SEQ ID NO: 70975 - DNA, 22 bp, Artificial Sequence
  chemically synthesized
ctctgctcaggggtgggatgcg

SEQ ID NO: 70976 - DNA, 22 bp, Artificial Sequence
  chemically synthesized
tgctcaggggtgggatgcgtga

SEQ ID NO: 70977 - DNA, 22 bp, Artificial Sequence
  chemically synthesized
ctcaggggtgggatgcgtgaga

SEQ ID NO: 70978 - DNA, 22 bp, Artificial Sequence
  chemically synthesized
aggggtgggatgcgtgagagca

SEQ ID NO: 70979 - DNA, 22 bp, Artificial Sequence
  chemically synthesized
agatccagaccccgggcctcct

SEQ ID NO: 70980 - DNA, 22 bp, Artificial Sequence
  chemically synthesized
ctgcggcgccaagtcaggggag

SEQ ID NO: 70981 - DNA, 22 bp, Artificial Sequence
  chemically synthesized
cggcgccaagtcaggggagagg

SEQ ID NO: 70982 - DNA, 22 bp, Artificial Sequence
  chemically synthesized
cttcgggtcgccatggcaacga

SEQ ID NO: 70983 - DNA, 22 bp, Artificial Sequence
  chemically synthesized
cgggtcgccatggcaacgaggc

SEQ ID NO: 70984 - DNA, 22 bp, Artificial Sequence
  chemically synthesized
gggtcgccatggcaacgaggcc

SEQ ID NO: 70985 - DNA, 22 bp, Artificial Sequence
  chemically synthesized
gaatgccacagtggtagccctc

SEQ ID NO: 70986 - DNA, 22 bp, Artificial Sequence
  chemically synthesized
ttcctcggcacatccggactcc

SEQ ID NO: 70987 - DNA, 22 bp, Artificial Sequence
  chemically synthesized
cctcggcacatccggactccca

SEQ ID NO: 70988 - DNA, 22 bp, Artificial Sequence
  chemically synthesized
ctcggcacatccggactcccag

SEQ ID NO: 70989 - DNA, 22 bp, Artificial Sequence
  chemically synthesized
ggcacatccggactcccagttc

SEQ ID NO: 70990 - DNA, 22 bp, Artificial Sequence
  chemically synthesized
ccagttctgctgcttcaagtca

SEQ ID NO: 70991 - DNA, 22 bp, Artificial Sequence
  chemically synthesized
tgctgcttcaagtcaatgtcca

SEQ ID NO: 70992 - DNA, 22 bp, Artificial Sequence
  chemically synthesized
ctgcttcaagtcaatgtccaca

SEQ ID NO: 70993 - DNA, 22 bp, Artificial Sequence
  chemically synthesized
cttcaagtcaatgtccacagca

SEQ ID NO: 70994 - DNA, 22 bp, Artificial Sequence
  chemically synthesized
caagtcaatgtccacagcaagg

SEQ ID NO: 70995 - DNA, 22 bp, Artificial Sequence
  chemically synthesized
aagtcaatgtccacagcaaggg

SEQ ID NO: 70996 - DNA, 22 bp, Artificial Sequence
  chemically synthesized
ccttcttcccttcaccattgcc

SEQ ID NO: 70997 - DNA, 22 bp, Artificial Sequence
  chemically synthesized
cttcccttcaccattgccttcc

SEQ ID NO: 70998 - DNA, 22 bp, Artificial Sequence
  chemically synthesized
ttcccttcaccattgccttccc

SEQ ID NO: 70999 - DNA, 22 bp, Artificial Sequence
  chemically synthesized
cccttcaccattgccttccccc

SEQ ID NO: 71000 - DNA, 22 bp, Artificial Sequence
  chemically synthesized
ccttcaccattgccttccccct

SEQ ID NO: 71001 - DNA, 22 bp, Artificial Sequence
  chemically synthesized
caccattgccttcccccttcca

SEQ ID NO: 71002 - DNA, 22 bp, Artificial Sequence
  chemically synthesized
accattgccttcccccttccaa

SEQ ID NO: 71003 - DNA, 22 bp, Artificial Sequence
  chemically synthesized
ccttcccccttccaaaaaagaa

SEQ ID NO: 71004 - DNA, 22 bp, Artificial Sequence
  chemically synthesized
cccccttccaaaaaagaaaaga

SEQ ID NO: 71005 - DNA, 22 bp, Artificial Sequence
  chemically synthesized
ccccttccaaaaaagaaaagaa

SEQ ID NO: 71006 - DNA, 22 bp, Artificial Sequence
  chemically synthesized
ccaaaaaagaaaagaaaactgc

SEQ ID NO: 71007 - DNA, 22 bp, Artificial Sequence
  chemically synthesized
caaaaaagaaaagaaaactgca

SEQ ID NO: 71008 - DNA, 22 bp, Artificial Sequence
  chemically synthesized
catgtttgaaagaaactacagg

SEQ ID NO: 71009 - DNA, 22 bp, Artificial Sequence
  chemically synthesized
gaaagaaactacaggcagtttt

SEQ ID NO: 71010 - DNA, 22 bp, Artificial Sequence
  chemically synthesized
aaagaaactacaggcagttttt

SEQ ID NO: 71011 - DNA, 22 bp, Artificial Sequence
  chemically synthesized
caggcagtttttggtgcaattt

SEQ ID NO: 71012 - DNA, 22 bp, Artificial Sequence
  chemically synthesized
ttggtgcaatttgagagcaact

SEQ ID NO: 71013 - DNA, 22 bp, Artificial Sequence
  chemically synthesized
tggtgcaatttgagagcaactc

SEQ ID NO: 71014 - DNA, 22 bp, Artificial Sequence
  chemically synthesized
ggtgcaatttgagagcaactct

SEQ ID NO: 71015 - DNA, 22 bp, Artificial Sequence
  chemically synthesized
gtgcaatttgagagcaactctt

SEQ ID NO: 71016 - DNA, 22 bp, Artificial Sequence
  chemically synthesized
gagagcaactcttttgggttct

SEQ ID NO: 71017 - DNA, 22 bp, Artificial Sequence
  chemically synthesized
agagcaactcttttgggttctg

SEQ ID NO: 71018 - DNA, 22 bp, Artificial Sequence
  chemically synthesized
ttttgggttctggttttctctt

SEQ ID NO: 71019 - DNA, 22 bp, Artificial Sequence
  chemically synthesized
ttgggttctggttttctcttca

SEQ ID NO: 71020 - DNA, 22 bp, Artificial Sequence
  chemically synthesized
tgggttctggttttctcttcag

SEQ ID NO: 71021 - DNA, 22 bp, Artificial Sequence
  chemically synthesized
gggttctggttttctcttcaga

SEQ ID NO: 71022 - DNA, 22 bp, Artificial Sequence
  chemically synthesized
ggttctggttttctcttcagag

SEQ ID NO: 71023 - DNA, 22 bp, Artificial Sequence
  chemically synthesized
tggttttctcttcagagatttg

SEQ ID NO: 71024 - DNA, 22 bp, Artificial Sequence
  chemically synthesized
gttttctcttcagagatttgtt

SEQ ID NO: 71025 - DNA, 22 bp, Artificial Sequence
  chemically synthesized
tctcttcagagatttgttcgcc

SEQ ID NO: 71026 - DNA, 22 bp, Artificial Sequence
  chemically synthesized
ctcttcagagatttgttcgcct

SEQ ID NO: 71027 - DNA, 22 bp, Artificial Sequence
  chemically synthesized
tcttcagagatttgttcgcctc

SEQ ID NO: 71028 - DNA, 22 bp, Artificial Sequence
  chemically synthesized
ttcagagatttgttcgcctctt

SEQ ID NO: 71029 - DNA, 22 bp, Artificial Sequence
  chemically synthesized
cagagatttgttcgcctcttgt

SEQ ID NO: 71030 - DNA, 22 bp, Artificial Sequence
  chemically synthesized
agagatttgttcgcctcttgta

SEQ ID NO: 71031 - DNA, 22 bp, Artificial Sequence
  chemically synthesized
gttcgcctcttgtaaatcattg

SEQ ID NO: 71032 - DNA, 22 bp, Artificial Sequence
  chemically synthesized
ttcgcctcttgtaaatcattgg

SEQ ID NO: 71033 - DNA, 22 bp, Artificial Sequence
  chemically synthesized
gcctcttgtaaatcattggctg

SEQ ID NO: 71034 - DNA, 22 bp, Artificial Sequence
  chemically synthesized
ttgtaaatcattggctgctttg

SEQ ID NO: 71035 - DNA, 22 bp, Artificial Sequence
  chemically synthesized
gtaaatcattggctgctttgac

SEQ ID NO: 71036 - DNA, 22 bp, Artificial Sequence
  chemically synthesized
taaatcattggctgctttgacg

SEQ ID NO: 71037 - DNA, 22 bp, Artificial Sequence
  chemically synthesized
gctgctttgacgttgaacttga

SEQ ID NO: 71038 - DNA, 22 bp, Artificial Sequence
  chemically synthesized
ctttgacgttgaacttgatgac

SEQ ID NO: 71039 - DNA, 22 bp, Artificial Sequence
  chemically synthesized
tgacgttgaacttgatgacatt

SEQ ID NO: 71040 - DNA, 22 bp, Artificial Sequence
  chemically synthesized
gacgttgaacttgatgacattt

SEQ ID NO: 71041 - DNA, 22 bp, Artificial Sequence
  chemically synthesized
acgttgaacttgatgacatttc

SEQ ID NO: 71042 - DNA, 22 bp, Artificial Sequence
  chemically synthesized
aacttgatgacatttcatgttt

SEQ ID NO: 71043 - DNA, 22 bp, Artificial Sequence
  chemically synthesized
gatgacatttcatgttttcgtt

SEQ ID NO: 71044 - DNA, 22 bp, Artificial Sequence
  chemically synthesized
atgacatttcatgttttcgttg

SEQ ID NO: 71045 - DNA, 22 bp, Artificial Sequence
  chemically synthesized
catgttttcgttgtgctgcttt

SEQ ID NO: 71046 - DNA, 22 bp, Artificial Sequence
  chemically synthesized
atgttttcgttgtgctgctttt

SEQ ID NO: 71047 - DNA, 22 bp, Artificial Sequence
  chemically synthesized
tcgttgtgctgcttttacatca

SEQ ID NO: 71048 - DNA, 22 bp, Artificial Sequence
  chemically synthesized
cgttgtgctgcttttacatcag

SEQ ID NO: 71049 - DNA, 22 bp, Artificial Sequence
  chemically synthesized
gttgtgctgcttttacatcagt

SEQ ID NO: 71050 - DNA, 22 bp, Artificial Sequence
  chemically synthesized
tgctgcttttacatcagttttg

SEQ ID NO: 71051 - DNA, 22 bp, Artificial Sequence
  chemically synthesized
cttttacatcagttttgatttt

SEQ ID NO: 71052 - DNA, 22 bp, Artificial Sequence
  chemically synthesized
ttacatcagttttgattttttg

SEQ ID NO: 71053 - DNA, 22 bp, Artificial Sequence
  chemically synthesized
tacatcagttttgattttttgt

SEQ ID NO: 71054 - DNA, 22 bp, Artificial Sequence
  chemically synthesized
acatcagttttgattttttgtt

SEQ ID NO: 71055 - DNA, 22 bp, Artificial Sequence
  chemically synthesized
catcagttttgattttttgttt

SEQ ID NO: 71056 - DNA, 22 bp, Artificial Sequence
  chemically synthesized
tgattttttgtttctttataat

SEQ ID NO: 71057 - DNA, 22 bp, Artificial Sequence
  chemically synthesized
gattttttgtttctttataatt

SEQ ID NO: 71058 - DNA, 22 bp, Artificial Sequence
  chemically synthesized
attttttgtttctttataattt

SEQ ID NO: 71059 - DNA, 22 bp, Artificial Sequence
  chemically synthesized
tttgtttctttataattttatt

SEQ ID NO: 71060 - DNA, 22 bp, Artificial Sequence
  chemically synthesized
ttgtttctttataattttatta

SEQ ID NO: 71061 - DNA, 22 bp, Artificial Sequence
  chemically synthesized
tgtttctttataattttattat

SEQ ID NO: 71062 - DNA, 22 bp, Artificial Sequence
  chemically synthesized
gtttctttataattttattatt

SEQ ID NO: 71063 - DNA, 22 bp, Artificial Sequence
  chemically synthesized
tttctttataattttattatta

SEQ ID NO: 71064 - DNA, 22 bp, Artificial Sequence
  chemically synthesized
ctttataattttattattattt

SEQ ID NO: 71065 - DNA, 22 bp, Artificial Sequence
  chemically synthesized
tttataattttattattatttt

SEQ ID NO: 71066 - DNA, 22 bp, Artificial Sequence
  chemically synthesized
tataattttattattattttga

SEQ ID NO: 71067 - DNA, 22 bp, Artificial Sequence
  chemically synthesized
ataattttattattattttgag

SEQ ID NO: 71068 - DNA, 22 bp, Artificial Sequence
  chemically synthesized
taattttattattattttgaga

SEQ ID NO: 71069 - DNA, 22 bp, Artificial Sequence
  chemically synthesized
tattattattttgagaaggtgt

SEQ ID NO: 71070 - DNA, 22 bp, Artificial Sequence
  chemically synthesized
attattattttgagaaggtgtc

SEQ ID NO: 71071 - DNA, 22 bp, Artificial Sequence
  chemically synthesized
ttattattttgagaaggtgtcc

SEQ ID NO: 71072 - DNA, 22 bp, Artificial Sequence
  chemically synthesized
ttattttgagaaggtgtcccct

SEQ ID NO: 71073 - DNA, 22 bp, Artificial Sequence
  chemically synthesized
ttttgagaaggtgtcccctttc

SEQ ID NO: 71074 - DNA, 22 bp, Artificial Sequence
  chemically synthesized
tgagaaggtgtcccctttccct

SEQ ID NO: 71075 - DNA, 22 bp, Artificial Sequence
  chemically synthesized
gagaaggtgtcccctttccctc

SEQ ID NO: 71076 - DNA, 22 bp, Artificial Sequence
  chemically synthesized
agaaggtgtcccctttccctcc

SEQ ID NO: 71077 - DNA, 22 bp, Artificial Sequence
  chemically synthesized
tccctcctccctctcccgctct

SEQ ID NO: 71078 - DNA, 22 bp, Artificial Sequence
  chemically synthesized
ccctcctccctctcccgctctc

SEQ ID NO: 71079 - DNA, 22 bp, Artificial Sequence
  chemically synthesized
cctcctccctctcccgctctcc

SEQ ID NO: 71080 - DNA, 22 bp, Artificial Sequence
  chemically synthesized
ctccctctcccgctctcctcaa

SEQ ID NO: 71081 - DNA, 22 bp, Artificial Sequence
  chemically synthesized
cctctcccgctctcctcaacca

SEQ ID NO: 71082 - DNA, 22 bp, Artificial Sequence
  chemically synthesized
tcccgctctcctcaaccaaagg

SEQ ID NO: 71083 - DNA, 22 bp, Artificial Sequence
  chemically synthesized
ccgctctcctcaaccaaaggac

SEQ ID NO: 71084 - DNA, 22 bp, Artificial Sequence
  chemically synthesized
tcctcaaccaaaggactgtttc

SEQ ID NO: 71085 - DNA, 22 bp, Artificial Sequence
  chemically synthesized
ctcaaccaaaggactgtttctt

SEQ ID NO: 71086 - DNA, 22 bp, Artificial Sequence
  chemically synthesized
aaccaaaggactgtttcttact

SEQ ID NO: 71087 - DNA, 22 bp, Artificial Sequence
  chemically synthesized
tttcttactaagttttctcagt

SEQ ID NO: 71088 - DNA, 22 bp, Artificial Sequence
  chemically synthesized
cttactaagttttctcagtcat

SEQ ID NO: 71089 - DNA, 22 bp, Artificial Sequence
  chemically synthesized
ttactaagttttctcagtcata

SEQ ID NO: 71090 - DNA, 22 bp, Artificial Sequence
  chemically synthesized
actaagttttctcagtcataag

SEQ ID NO: 71091 - DNA, 22 bp, Artificial Sequence
  chemically synthesized
ctaagttttctcagtcataagg

SEQ ID NO: 71092 - DNA, 22 bp, Artificial Sequence
  chemically synthesized
agttttctcagtcataagggca

SEQ ID NO: 71093 - DNA, 22 bp, Artificial Sequence
  chemically synthesized
tctcagtcataagggcaagtgt

SEQ ID NO: 71094 - DNA, 22 bp, Artificial Sequence
  chemically synthesized
ctcagtcataagggcaagtgtt

SEQ ID NO: 71095 - DNA, 22 bp, Artificial Sequence
  chemically synthesized
tcagtcataagggcaagtgttt

SEQ ID NO: 71096 - DNA, 22 bp, Artificial Sequence
  chemically synthesized
agtcataagggcaagtgtttcc

SEQ ID NO: 71097 - DNA, 22 bp, Artificial Sequence
  chemically synthesized
ccttccaggtgtgtcccgagtt

SEQ ID NO: 71098 - DNA, 22 bp, Artificial Sequence
  chemically synthesized
cttccaggtgtgtcccgagttt

SEQ ID NO: 71099 - DNA, 22 bp, Artificial Sequence
  chemically synthesized
ccaggtgtgtcccgagtttatt

SEQ ID NO: 71100 - DNA, 22 bp, Artificial Sequence
  chemically synthesized
caggtgtgtcccgagtttatta

SEQ ID NO: 71101 - DNA, 22 bp, Artificial Sequence
  chemically synthesized
attaggactatcatacaattgg

SEQ ID NO: 71102 - DNA, 22 bp, Artificial Sequence
  chemically synthesized
ttaggactatcatacaattggg

SEQ ID NO: 71103 - DNA, 22 bp, Artificial Sequence
  chemically synthesized
ggactatcatacaattgggcag

SEQ ID NO: 71104 - DNA, 22 bp, Artificial Sequence
  chemically synthesized
tcatacaattgggcaggggtgg

SEQ ID NO: 71105 - DNA, 22 bp, Artificial Sequence
  chemically synthesized
ggcaggggtggggggacctggg

SEQ ID NO: 71106 - DNA, 22 bp, Artificial Sequence
  chemically synthesized
ggtcctccttggggggacggaa

SEQ ID NO: 71107 - DNA, 22 bp, Artificial Sequence
  chemically synthesized
cttggggggacggaagggaggg

SEQ ID NO: 71108 - DNA, 22 bp, Artificial Sequence
  chemically synthesized
ggggggacggaagggagggagg

SEQ ID NO: 71109 - DNA, 22 bp, Artificial Sequence
  chemically synthesized
gggggacggaagggagggaggc

SEQ ID NO: 71110 - DNA, 22 bp, Artificial Sequence
  chemically synthesized
agaggtcagagatacttgggga

SEQ ID NO: 71111 - DNA, 22 bp, Artificial Sequence
  chemically synthesized
ggggaggggaggctgagtttga

SEQ ID NO: 71112 - DNA, 22 bp, Artificial Sequence
  chemically synthesized
gggaggggaggctgagtttgaa

SEQ ID NO: 71113 - DNA, 22 bp, Artificial Sequence
  chemically synthesized
agtttgaaatcatgcttaagat

SEQ ID NO: 71114 - DNA, 22 bp, Artificial Sequence
  chemically synthesized
gaaatcatgcttaagatgccag

SEQ ID NO: 71115 - DNA, 22 bp, Artificial Sequence
  chemically synthesized
aaatcatgcttaagatgccagt

SEQ ID NO: 71116 - DNA, 22 bp, Artificial Sequence
  chemically synthesized
aagatgccagtggctcgacctg

SEQ ID NO: 71117 - DNA, 22 bp, Artificial Sequence
  chemically synthesized
agatgccagtggctcgacctgt

SEQ ID NO: 71118 - DNA, 22 bp, Artificial Sequence
  chemically synthesized
gacctgtggttggtttaagttc

SEQ ID NO: 71119 - DNA, 22 bp, Artificial Sequence
  chemically synthesized
tggttggtttaagttctaattt

SEQ ID NO: 71120 - DNA, 22 bp, Artificial Sequence
  chemically synthesized
gtttaagttctaatttttaaaa

SEQ ID NO: 71121 - DNA, 22 bp, Artificial Sequence
  chemically synthesized
aagttctaatttttaaaaagct

SEQ ID NO: 71122 - DNA, 22 bp, Artificial Sequence
  chemically synthesized
agttctaatttttaaaaagcta

SEQ ID NO: 71123 - DNA, 22 bp, Artificial Sequence
  chemically synthesized
taatttttaaaaagctagttag

SEQ ID NO: 71124 - DNA, 22 bp, Artificial Sequence
  chemically synthesized
atttttaaaaagctagttagag

SEQ ID NO: 71125 - DNA, 22 bp, Artificial Sequence
  chemically synthesized
ttaaaaagctagttagagaaca

SEQ ID NO: 71126 - DNA, 22 bp, Artificial Sequence
  chemically synthesized
taaaaagctagttagagaacag

SEQ ID NO: 71127 - DNA, 22 bp, Artificial Sequence
  chemically synthesized
aaaaagctagttagagaacaga

SEQ ID NO: 71128 - DNA, 22 bp, Artificial Sequence
  chemically synthesized
aaaagctagttagagaacagaa

SEQ ID NO: 71129 - DNA, 22 bp, Artificial Sequence
  chemically synthesized
gttagagaacagaaaatcattg

SEQ ID NO: 71130 - DNA, 22 bp, Artificial Sequence
  chemically synthesized
gagaacagaaaatcattgggcc

SEQ ID NO: 71131 - DNA, 22 bp, Artificial Sequence
  chemically synthesized
ggccaagtcacacctgtacttt

SEQ ID NO: 71132 - DNA, 22 bp, Artificial Sequence
  chemically synthesized
tactttttttttccccctcctc

SEQ ID NO: 71133 - DNA, 22 bp, Artificial Sequence
  chemically synthesized
tttttttccccctcctctgtct

SEQ ID NO: 71134 - DNA, 22 bp, Artificial Sequence
  chemically synthesized
ttttttccccctcctctgtctc

SEQ ID NO: 71135 - DNA, 22 bp, Artificial Sequence
  chemically synthesized
tttttccccctcctctgtctcc

SEQ ID NO: 71136 - DNA, 22 bp, Artificial Sequence
  chemically synthesized
ttttccccctcctctgtctcca

SEQ ID NO: 71137 - DNA, 22 bp, Artificial Sequence
  chemically synthesized
tttccccctcctctgtctccaa

SEQ ID NO: 71138 - DNA, 22 bp, Artificial Sequence
  chemically synthesized
ttccccctcctctgtctccaac

SEQ ID NO: 71139 - DNA, 22 bp, Artificial Sequence
  chemically synthesized
tccccctcctctgtctccaacc

SEQ ID NO: 71140 - DNA, 22 bp, Artificial Sequence
  chemically synthesized
ccccctcctctgtctccaacct

SEQ ID NO: 71141 - DNA, 22 bp, Artificial Sequence
  chemically synthesized
cccctcctctgtctccaacctc

SEQ ID NO: 71142 - DNA, 22 bp, Artificial Sequence
  chemically synthesized
ctctgtctccaacctctttcta

SEQ ID NO: 71143 - DNA, 22 bp, Artificial Sequence
  chemically synthesized
tgtctccaacctctttctaggt

SEQ ID NO: 71144 - DNA, 22 bp, Artificial Sequence
  chemically synthesized
tctccaacctctttctaggttc

SEQ ID NO: 71145 - DNA, 22 bp, Artificial Sequence
  chemically synthesized
caacctctttctaggttcttca

SEQ ID NO: 71146 - DNA, 22 bp, Artificial Sequence
  chemically synthesized
tttctaggttcttcacacaccc

SEQ ID NO: 71147 - DNA, 22 bp, Artificial Sequence
  chemically synthesized
tctaggttcttcacacaccccc

SEQ ID NO: 71148 - DNA, 22 bp, Artificial Sequence
  chemically synthesized
ctaggttcttcacacaccccca

SEQ ID NO: 71149 - DNA, 22 bp, Artificial Sequence
  chemically synthesized
taggttcttcacacacccccat

SEQ ID NO: 71150 - DNA, 22 bp, Artificial Sequence
  chemically synthesized
ggttcttcacacacccccattc

SEQ ID NO: 71151 - DNA, 22 bp, Artificial Sequence
  chemically synthesized
ttcacacacccccattcggcgt

SEQ ID NO: 71152 - DNA, 22 bp, Artificial Sequence
  chemically synthesized
cacacacccccattcggcgtag

SEQ ID NO: 71153 - DNA, 22 bp, Artificial Sequence
  chemically synthesized
acacacccccattcggcgtagt

SEQ ID NO: 71154 - DNA, 22 bp, Artificial Sequence
  chemically synthesized
ggcgtagtacccagagagctca

SEQ ID NO: 71155 - DNA, 22 bp, Artificial Sequence
  chemically synthesized
aagatgtgtggcagttttcgga

SEQ ID NO: 71156 - DNA, 22 bp, Artificial Sequence
  chemically synthesized
tcggatggaagctcgagagccc

SEQ ID NO: 71157 - DNA, 22 bp, Artificial Sequence
  chemically synthesized
cggatggaagctcgagagccct

SEQ ID NO: 71158 - DNA, 22 bp, Artificial Sequence
  chemically synthesized
ggatggaagctcgagagccctt

SEQ ID NO: 71159 - DNA, 22 bp, Artificial Sequence
  chemically synthesized
gagagcccttaagttctgagaa

SEQ ID NO: 71160 - DNA, 22 bp, Artificial Sequence
  chemically synthesized
aagttctgagaaaatttgaagc

SEQ ID NO: 71161 - DNA, 22 bp, Artificial Sequence
  chemically synthesized
agttctgagaaaatttgaagcc

SEQ ID NO: 71162 - DNA, 22 bp, Artificial Sequence
  chemically synthesized
tgagaaaatttgaagcccccag

SEQ ID NO: 71163 - DNA, 22 bp, Artificial Sequence
  chemically synthesized
agaaaatttgaagcccccaggg

SEQ ID NO: 71164 - DNA, 22 bp, Artificial Sequence
  chemically synthesized
gaagcccccaggggtggggtgg

SEQ ID NO: 71165 - DNA, 22 bp, Artificial Sequence
  chemically synthesized
aagcccccaggggtggggtgga

SEQ ID NO: 71166 - DNA, 22 bp, Artificial Sequence
  chemically synthesized
tcatcctgctagtttgtgatgt

SEQ ID NO: 71167 - DNA, 22 bp, Artificial Sequence
  chemically synthesized
ctagtttgtgatgttttctgac

SEQ ID NO: 71168 - DNA, 22 bp, Artificial Sequence
  chemically synthesized
gtttgtgatgttttctgacagt

SEQ ID NO: 71169 - DNA, 22 bp, Artificial Sequence
  chemically synthesized
gtgatgttttctgacagtagcc

SEQ ID NO: 71170 - DNA, 22 bp, Artificial Sequence
  chemically synthesized
tgatgttttctgacagtagcct

SEQ ID NO: 71171 - DNA, 22 bp, Artificial Sequence
  chemically synthesized
tctgacagtagcctccaagaag

SEQ ID NO: 71172 - DNA, 22 bp, Artificial Sequence
  chemically synthesized
ctgacagtagcctccaagaagc

SEQ ID NO: 71173 - DNA, 22 bp, Artificial Sequence
  chemically synthesized
tgacagtagcctccaagaagcc

SEQ ID NO: 71174 - DNA, 22 bp, Artificial Sequence
  chemically synthesized
acagtagcctccaagaagccgt

SEQ ID NO: 71175 - DNA, 22 bp, Artificial Sequence
  chemically synthesized
caagaagccgttgtgcgaagac

SEQ ID NO: 71176 - DNA, 22 bp, Artificial Sequence
  chemically synthesized
tgcgaagacagagtcctgcaga

SEQ ID NO: 71177 - DNA, 22 bp, Artificial Sequence
  chemically synthesized
cagagtccttccagcctaggcc

SEQ ID NO: 71178 - DNA, 22 bp, Artificial Sequence
  chemically synthesized
ccagcctaggcctgcagcgcca

SEQ ID NO: 71179 - DNA, 22 bp, Artificial Sequence
  chemically synthesized
cagcctaggcctgcagcgccat

SEQ ID NO: 71180 - DNA, 22 bp, Artificial Sequence
  chemically synthesized
ggcctgcagcgccattttattt

SEQ ID NO: 71181 - DNA, 22 bp, Artificial Sequence
  chemically synthesized
cagcgccattttatttatattt

SEQ ID NO: 71182 - DNA, 22 bp, Artificial Sequence
  chemically synthesized
tatttatattttttaataaaaa

SEQ ID NO: 71183 - DNA, 22 bp, Artificial Sequence
  chemically synthesized
atttatattttttaataaaaag

SEQ ID NO: 71184 - DNA, 22 bp, Artificial Sequence
  chemically synthesized
tttatattttttaataaaaagt

SEQ ID NO: 71185 - DNA, 22 bp, Artificial Sequence
  chemically synthesized
atattttttaataaaaagtaaa

SEQ ID NO: 71186 - DNA, 22 bp, Artificial Sequence
  chemically synthesized
tattttttaataaaaagtaaaa

SEQ ID NO: 71187 - DNA, 22 bp, Artificial Sequence
  chemically synthesized
tttaataaaaagtaaaaacaaa

SEQ ID NO: 71188 - DNA, 22 bp, Artificial Sequence
  chemically synthesized
ttaataaaaagtaaaaacaaaa

SEQ ID NO: 71189 - DNA, 22 bp, Artificial Sequence
  chemically synthesized
taataaaaagtaaaaacaaaaa

SEQ ID NO: 71190 - DNA, 22 bp, Artificial Sequence
  chemically synthesized
aataaaaagtaaaaacaaaaaa

SEQ ID NO: 71191 - DNA, 22 bp, Artificial Sequence
  chemically synthesized
ataaaaagtaaaaacaaaaaaa

SEQ ID NO: 71192 - DNA, 22 bp, Artificial Sequence
  chemically synthesized
gaacagtgaatcagtcccatag

SEQ ID NO: 71193 - DNA, 22 bp, Artificial Sequence
  chemically synthesized
tcatgagtgatgccctggccct

SEQ ID NO: 71194 - DNA, 22 bp, Artificial Sequence
  chemically synthesized
gcccttctgaaaccagccaacc

SEQ ID NO: 71195 - DNA, 22 bp, Artificial Sequence
  chemically synthesized
ctgaaaccagccaacctaatta

SEQ ID NO: 71196 - DNA, 22 bp, Artificial Sequence
  chemically synthesized
tgaaaccagccaacctaattac

SEQ ID NO: 71197 - DNA, 22 bp, Artificial Sequence
  chemically synthesized
aaaccagccaacctaattacct

SEQ ID NO: 71198 - DNA, 22 bp, Artificial Sequence
  chemically synthesized
attacctgtattgtggaaatgc

SEQ ID NO: 71199 - DNA, 22 bp, Artificial Sequence
  chemically synthesized
cctgtattgtggaaatgcgcat

SEQ ID NO: 71200 - DNA, 22 bp, Artificial Sequence
  chemically synthesized
tattgtggaaatgcgcatgagt

SEQ ID NO: 71201 - DNA, 22 bp, Artificial Sequence
  chemically synthesized
tggaaatgcgcatgagtcccca

SEQ ID NO: 71202 - DNA, 22 bp, Artificial Sequence
  chemically synthesized
gtttctatacattctatgttgt

SEQ ID NO: 71203 - DNA, 22 bp, Artificial Sequence
  chemically synthesized
tttctatacattctatgttgtc

SEQ ID NO: 71204 - DNA, 22 bp, Artificial Sequence
  chemically synthesized
ctatacattctatgttgtcttt

SEQ ID NO: 71205 - DNA, 22 bp, Artificial Sequence
  chemically synthesized
tatacattctatgttgtctttt

SEQ ID NO: 71206 - DNA, 22 bp, Artificial Sequence
  chemically synthesized
tacattctatgttgtcttttaa

SEQ ID NO: 71207 - DNA, 22 bp, Artificial Sequence
  chemically synthesized
tatgttgtcttttaaaaagtgt

SEQ ID NO: 71208 - DNA, 22 bp, Artificial Sequence
  chemically synthesized
tgttgtcttttaaaaagtgtgc

SEQ ID NO: 71209 - DNA, 22 bp, Artificial Sequence
  chemically synthesized
tcttttaaaaagtgtgcttaac

SEQ ID NO: 71210 - DNA, 22 bp, Artificial Sequence
  chemically synthesized
ttaaaaagtgtgcttaacattg

SEQ ID NO: 71211 - DNA, 22 bp, Artificial Sequence
  chemically synthesized
taaaaagtgtgcttaacattga

SEQ ID NO: 71212 - DNA, 22 bp, Artificial Sequence
  chemically synthesized
aaaaagtgtgcttaacattgac

SEQ ID NO: 71213 - DNA, 22 bp, Artificial Sequence
  chemically synthesized
aaaagtgtgcttaacattgaca

SEQ ID NO: 71214 - DNA, 22 bp, Artificial Sequence
  chemically synthesized
aacattgacacaataaatgttg

SEQ ID NO: 71215 - DNA, 22 bp, Artificial Sequence
  chemically synthesized
acattgacacaataaatgttgg

SEQ ID NO: 71216 - DNA, 22 bp, Artificial Sequence
  chemically synthesized
acacaataaatgttggagcttt

SEQ ID NO: 71217 - DNA, 22 bp, Artificial Sequence
  chemically synthesized
gagctttaggtggtgtttgctt

SEQ ID NO: 71218 - DNA, 22 bp, Artificial Sequence
  chemically synthesized
taggtggtgtttgcttgttctt

SEQ ID NO: 71219 - DNA, 22 bp, Artificial Sequence
  chemically synthesized
aggtggtgtttgcttgttcttt

SEQ ID NO: 71220 - DNA, 22 bp, Artificial Sequence
  chemically synthesized
ggtggtgtttgcttgttcttta

SEQ ID NO: 71221 - DNA, 22 bp, Artificial Sequence
  chemically synthesized
gcttgttctttaatttttaatg

SEQ ID NO: 71222 - DNA, 22 bp, Artificial Sequence
  chemically synthesized
cttgttctttaatttttaatgc

SEQ ID NO: 71223 - DNA, 22 bp, Artificial Sequence
  chemically synthesized
gttctttaatttttaatgctta

SEQ ID NO: 71224 - DNA, 22 bp, Artificial Sequence
  chemically synthesized
ttctttaatttttaatgcttat

SEQ ID NO: 71225 - DNA, 22 bp, Artificial Sequence
  chemically synthesized
tttaatttttaatgcttataag

SEQ ID NO: 71226 - DNA, 22 bp, Artificial Sequence
  chemically synthesized
taatttttaatgcttataagac

SEQ ID NO: 71227 - DNA, 22 bp, Artificial Sequence
  chemically synthesized
aatttttaatgcttataagaca

SEQ ID NO: 71228 - DNA, 22 bp, Artificial Sequence
  chemically synthesized
atttttaatgcttataagacaa

SEQ ID NO: 71229 - DNA, 22 bp, Artificial Sequence
  chemically synthesized
ttaatgcttataagacaatgag

SEQ ID NO: 71230 - DNA, 22 bp, Artificial Sequence
  chemically synthesized
taatgcttataagacaatgagg

SEQ ID NO: 71231 - DNA, 22 bp, Artificial Sequence
  chemically synthesized
aatgcttataagacaatgaggc

SEQ ID NO: 71232 - DNA, 22 bp, Artificial Sequence
  chemically synthesized
atgcttataagacaatgaggct

SEQ ID NO: 71233 - DNA, 22 bp, Artificial Sequence
  chemically synthesized
ataagacaatgaggctgcttat

SEQ ID NO: 71234 - DNA, 22 bp, Artificial Sequence
  chemically synthesized
taagacaatgaggctgcttatg

SEQ ID NO: 71235 - DNA, 22 bp, Artificial Sequence
  chemically synthesized
cttatgattttgtacttctgta

SEQ ID NO: 71236 - DNA, 22 bp, Artificial Sequence
  chemically synthesized
atgattttgtacttctgtacct

SEQ ID NO: 71237 - DNA, 22 bp, Artificial Sequence
  chemically synthesized
tgattttgtacttctgtacctg

SEQ ID NO: 71238 - DNA, 22 bp, Artificial Sequence
  chemically synthesized
tgtacttctgtacctgtttcct

SEQ ID NO: 71239 - DNA, 22 bp, Artificial Sequence
  chemically synthesized
gtacttctgtacctgtttccta

SEQ ID NO: 71240 - DNA, 22 bp, Artificial Sequence
  chemically synthesized
tacttctgtacctgtttcctac

SEQ ID NO: 71241 - DNA, 22 bp, Artificial Sequence
  chemically synthesized
ctgtacctgtttcctacagaca

SEQ ID NO: 71242 - DNA, 22 bp, Artificial Sequence
  chemically synthesized
tgtacctgtttcctacagacac

SEQ ID NO: 71243 - DNA, 22 bp, Artificial Sequence
  chemically synthesized
tacctgtttcctacagacaccc

SEQ ID NO: 71244 - DNA, 22 bp, Artificial Sequence
  chemically synthesized
tttcctacagacacccatcggg

SEQ ID NO: 71245 - DNA, 22 bp, Artificial Sequence
  chemically synthesized
cctacagacacccatcgggtgg

SEQ ID NO: 71246 - DNA, 22 bp, Artificial Sequence
  chemically synthesized
ctacagacacccatcgggtggg

SEQ ID NO: 71247 - DNA, 22 bp, Artificial Sequence
  chemically synthesized
cagacacccatcgggtgggtag

SEQ ID NO: 71248 - DNA, 22 bp, Artificial Sequence
  chemically synthesized
gagaaatgggcaggagatgtag

SEQ ID NO: 71249 - DNA, 22 bp, Artificial Sequence
  chemically synthesized
agaaatgggcaggagatgtagg

SEQ ID NO: 71250 - DNA, 22 bp, Artificial Sequence
  chemically synthesized
ggttaccgcttatcagatggca

SEQ ID NO: 71251 - DNA, 22 bp, Artificial Sequence
  chemically synthesized
ccgcttatcagatggcataaat

SEQ ID NO: 71252 - DNA, 22 bp, Artificial Sequence
  chemically synthesized
atcagatggcataaattttcaa

SEQ ID NO: 71253 - DNA, 22 bp, Artificial Sequence
  chemically synthesized
tcagatggcataaattttcaag

SEQ ID NO: 71254 - DNA, 22 bp, Artificial Sequence
  chemically synthesized
tcaaggagaatcaaaatgcaaa

SEQ ID NO: 71255 - DNA, 22 bp, Artificial Sequence
  chemically synthesized
caaggagaatcaaaatgcaaaa

SEQ ID NO: 71256 - DNA, 22 bp, Artificial Sequence
  chemically synthesized
aaggagaatcaaaatgcaaaac

SEQ ID NO: 71257 - DNA, 22 bp, Artificial Sequence
  chemically synthesized
gggaataaatcatagcaatatc

SEQ ID NO: 71258 - DNA, 22 bp, Artificial Sequence
  chemically synthesized
ggaataaatcatagcaatatca

SEQ ID NO: 71259 - DNA, 22 bp, Artificial Sequence
  chemically synthesized
atgtagtagtaatattgctgtt

SEQ ID NO: 71260 - DNA, 22 bp, Artificial Sequence
  chemically synthesized
ctgtttattaatgctgaagtgt

SEQ ID NO: 71261 - DNA, 22 bp, Artificial Sequence
  chemically synthesized
tttattaatgctgaagtgtggt

SEQ ID NO: 71262 - DNA, 22 bp, Artificial Sequence
  chemically synthesized
attaatgctgaagtgtggtttt

SEQ ID NO: 71263 - DNA, 22 bp, Artificial Sequence
  chemically synthesized
ttaatgctgaagtgtggttttc

SEQ ID NO: 71264 - DNA, 22 bp, Artificial Sequence
  chemically synthesized
atgctgaagtgtggttttccta

SEQ ID NO: 71265 - DNA, 22 bp, Artificial Sequence
  chemically synthesized
aagtgtggttttcctaactgtc

SEQ ID NO: 71266 - DNA, 22 bp, Artificial Sequence
  chemically synthesized
tcctaactgtctgacttataat

SEQ ID NO: 71267 - DNA, 22 bp, Artificial Sequence
  chemically synthesized
cctaactgtctgacttataatt

SEQ ID NO: 71268 - DNA, 22 bp, Artificial Sequence
  chemically synthesized
ctaactgtctgacttataattt

SEQ ID NO: 71269 - DNA, 22 bp, Artificial Sequence
  chemically synthesized
actgtctgacttataatttgca

SEQ ID NO: 71270 - DNA, 22 bp, Artificial Sequence
  chemically synthesized
tctgacttataatttgcatacc

SEQ ID NO: 71271 - DNA, 22 bp, Artificial Sequence
  chemically synthesized
acttataatttgcataccatta

SEQ ID NO: 71272 - DNA, 22 bp, Artificial Sequence
  chemically synthesized
ataatttgcataccattaaata

SEQ ID NO: 71273 - DNA, 22 bp, Artificial Sequence
  chemically synthesized
taatttgcataccattaaataa

SEQ ID NO: 71274 - DNA, 22 bp, Artificial Sequence
  chemically synthesized
gcataccattaaataatgcata

SEQ ID NO: 71275 - DNA, 22 bp, Artificial Sequence
  chemically synthesized
cataccattaaataatgcataa

SEQ ID NO: 71276 - DNA, 22 bp, Artificial Sequence
  chemically synthesized
aataatgcataatatggcacgc

SEQ ID NO: 71277 - DNA, 22 bp, Artificial Sequence
  chemically synthesized
tttttcaaatatatgcttttgg

SEQ ID NO: 71278 - DNA, 22 bp, Artificial Sequence
  chemically synthesized
ttcaaatatatgcttttggtgg

SEQ ID NO: 71279 - DNA, 22 bp, Artificial Sequence
  chemically synthesized
tcaaatatatgcttttggtggc

SEQ ID NO: 71280 - DNA, 22 bp, Artificial Sequence
  chemically synthesized
caaatatatgcttttggtggct

SEQ ID NO: 71281 - DNA, 22 bp, Artificial Sequence
  chemically synthesized
aaatatatgcttttggtggcta

SEQ ID NO: 71282 - DNA, 22 bp, Artificial Sequence
  chemically synthesized
ttggtggctaccatgcaggatt

SEQ ID NO: 71283 - DNA, 22 bp, Artificial Sequence
  chemically synthesized
tggtggctaccatgcaggattt

SEQ ID NO: 71284 - DNA, 22 bp, Artificial Sequence
  chemically synthesized
ggtggctaccatgcaggatttg

SEQ ID NO: 71285 - DNA, 22 bp, Artificial Sequence
  chemically synthesized
gtggctaccatgcaggatttga

SEQ ID NO: 71286 - DNA, 22 bp, Artificial Sequence
  chemically synthesized
ccatgcaggatttgaatttgtc

SEQ ID NO: 71287 - DNA, 22 bp, Artificial Sequence
  chemically synthesized
gaatttgtcttttaatttagct

SEQ ID NO: 71288 - DNA, 22 bp, Artificial Sequence
  chemically synthesized
aatttgtcttttaatttagctt

SEQ ID NO: 71289 - DNA, 22 bp, Artificial Sequence
  chemically synthesized
gtcttttaatttagcttaggaa

SEQ ID NO: 71290 - DNA, 22 bp, Artificial Sequence
  chemically synthesized
tcttttaatttagcttaggaaa

SEQ ID NO: 71291 - DNA, 22 bp, Artificial Sequence
  chemically synthesized
ttaatttagcttaggaaagaac

SEQ ID NO: 71292 - DNA, 22 bp, Artificial Sequence
  chemically synthesized
taatttagcttaggaaagaaca

SEQ ID NO: 71293 - DNA, 22 bp, Artificial Sequence
  chemically synthesized
aatttagcttaggaaagaacat

SEQ ID NO: 71294 - DNA, 22 bp, Artificial Sequence
  chemically synthesized
atttagcttaggaaagaacatc

SEQ ID NO: 71295 - DNA, 22 bp, Artificial Sequence
  chemically synthesized
agcttaggaaagaacatcactg

SEQ ID NO: 71296 - DNA, 22 bp, Artificial Sequence
  chemically synthesized
gcttaggaaagaacatcactgg

SEQ ID NO: 71297 - DNA, 22 bp, Artificial Sequence
  chemically synthesized
aggaaagaacatcactgggcga

SEQ ID NO: 71298 - DNA, 22 bp, Artificial Sequence
  chemically synthesized
ggaaagaacatcactgggcgag

SEQ ID NO: 71299 - DNA, 22 bp, Artificial Sequence
  chemically synthesized
ggcgagcggtaaatcctaaaga

SEQ ID NO: 71300 - DNA, 22 bp, Artificial Sequence
  chemically synthesized
aagaaggtgataaatgtcagta

SEQ ID NO: 71301 - DNA, 22 bp, Artificial Sequence
  chemically synthesized
cttattaaatattctaatttta

SEQ ID NO: 71302 - DNA, 22 bp, Artificial Sequence
  chemically synthesized
ttattaaatattctaattttag

SEQ ID NO: 71303 - DNA, 22 bp, Artificial Sequence
  chemically synthesized
attaaatattctaattttaggt

SEQ ID NO: 71304 - DNA, 22 bp, Artificial Sequence
  chemically synthesized
ttaaatattctaattttaggtt

SEQ ID NO: 71305 - DNA, 22 bp, Artificial Sequence
  chemically synthesized
aatattctaattttaggttccc

SEQ ID NO: 71306 - DNA, 22 bp, Artificial Sequence
  chemically synthesized
taattttaggttcccaaacctt

SEQ ID NO: 71307 - DNA, 22 bp, Artificial Sequence
  chemically synthesized
attttaggttcccaaaccttca

SEQ ID NO: 71308 - DNA, 22 bp, Artificial Sequence
  chemically synthesized
taggttcccaaaccttcaggaa

SEQ ID NO: 71309 - DNA, 22 bp, Artificial Sequence
  chemically synthesized
aggttcccaaaccttcaggaaa

SEQ ID NO: 71310 - DNA, 22 bp, Artificial Sequence
  chemically synthesized
ggttcccaaaccttcaggaaat

SEQ ID NO: 71311 - DNA, 22 bp, Artificial Sequence
  chemically synthesized
ccaaaccttcaggaaatatatc

SEQ ID NO: 71312 - DNA, 22 bp, Artificial Sequence
  chemically synthesized
caggaaatatatcttaatgcag

SEQ ID NO: 71313 - DNA, 22 bp, Artificial Sequence
  chemically synthesized
aggaaatatatcttaatgcaga

SEQ ID NO: 71314 - DNA, 22 bp, Artificial Sequence
  chemically synthesized
aatgcagacaaacaaacataaa

SEQ ID NO: 71315 - DNA, 22 bp, Artificial Sequence
  chemically synthesized
atgcagacaaacaaacataaaa

SEQ ID NO: 71316 - DNA, 22 bp, Artificial Sequence
  chemically synthesized
ctttagtacttacatcaggaaa

SEQ ID NO: 71317 - DNA, 22 bp, Artificial Sequence
  chemically synthesized
tttagtacttacatcaggaaat

SEQ ID NO: 71318 - DNA, 22 bp, Artificial Sequence
  chemically synthesized
tagtacttacatcaggaaattt

SEQ ID NO: 71319 - DNA, 22 bp, Artificial Sequence
  chemically synthesized
agtacttacatcaggaaatttg

SEQ ID NO: 71320 - DNA, 22 bp, Artificial Sequence
  chemically synthesized
gtacttacatcaggaaatttgg

SEQ ID NO: 71321 - DNA, 22 bp, Artificial Sequence
  chemically synthesized
acatcaggaaatttggggcaga

SEQ ID NO: 71322 - DNA, 22 bp, Artificial Sequence
  chemically synthesized
catcaggaaatttggggcagat

SEQ ID NO: 71323 - DNA, 22 bp, Artificial Sequence
  chemically synthesized
ggggcagattttagagggggga

SEQ ID NO: 71324 - DNA, 22 bp, Artificial Sequence
  chemically synthesized
gggcagattttagaggggggaa

SEQ ID NO: 71325 - DNA, 22 bp, Artificial Sequence
  chemically synthesized
tagaggggggaaattataggag

SEQ ID NO: 71326 - DNA, 22 bp, Artificial Sequence
  chemically synthesized
agaggggggaaattataggagg

SEQ ID NO: 71327 - DNA, 22 bp, Artificial Sequence
  chemically synthesized
gaggggggaaattataggagga

SEQ ID NO: 71328 - DNA, 22 bp, Artificial Sequence
  chemically synthesized
taggaggaaagaagttcacatc

SEQ ID NO: 71329 - DNA, 22 bp, Artificial Sequence
  chemically synthesized
acatcagaacagacaatcacag

SEQ ID NO: 71330 - DNA, 22 bp, Artificial Sequence
  chemically synthesized
tattccttagaaattagtgcca

SEQ ID NO: 71331 - DNA, 22 bp, Artificial Sequence
  chemically synthesized
ttccttagaaattagtgccaca

SEQ ID NO: 71332 - DNA, 22 bp, Artificial Sequence
  chemically synthesized
cttagaaattagtgccacaaat

SEQ ID NO: 71333 - DNA, 22 bp, Artificial Sequence
  chemically synthesized
agaaattagtgccacaaataag

SEQ ID NO: 71334 - DNA, 22 bp, Artificial Sequence
  chemically synthesized
gaaattagtgccacaaataagt

SEQ ID NO: 71335 - DNA, 22 bp, Artificial Sequence
  chemically synthesized
gtgccacaaataagttacatct

SEQ ID NO: 71336 - DNA, 22 bp, Artificial Sequence
  chemically synthesized
catctacaaacaggtggtaaaa

SEQ ID NO: 71337 - DNA, 22 bp, Artificial Sequence
  chemically synthesized
caaacaggtggtaaaaattctt

SEQ ID NO: 71338 - DNA, 22 bp, Artificial Sequence
  chemically synthesized
tttctggcccagttaatttgca

SEQ ID NO: 71339 - DNA, 22 bp, Artificial Sequence
  chemically synthesized
tctggcccagttaatttgcaca

SEQ ID NO: 71340 - DNA, 22 bp, Artificial Sequence
  chemically synthesized
ctggcccagttaatttgcacag

SEQ ID NO: 71341 - DNA, 22 bp, Artificial Sequence
  chemically synthesized
tggcccagttaatttgcacaga

SEQ ID NO: 71342 - DNA, 22 bp, Artificial Sequence
  chemically synthesized
gcccagttaatttgcacagaac

SEQ ID NO: 71343 - DNA, 22 bp, Artificial Sequence
  chemically synthesized
atttgcacagaacttttctcag

SEQ ID NO: 71344 - DNA, 22 bp, Artificial Sequence
  chemically synthesized
gcacagaacttttctcagtttg

SEQ ID NO: 71345 - DNA, 22 bp, Artificial Sequence
  chemically synthesized
cacagaacttttctcagtttgg

SEQ ID NO: 71346 - DNA, 22 bp, Artificial Sequence
  chemically synthesized
ttctcagtttggtattttttac

SEQ ID NO: 71347 - DNA, 22 bp, Artificial Sequence
  chemically synthesized
tctcagtttggtattttttact

SEQ ID NO: 71348 - DNA, 22 bp, Artificial Sequence
  chemically synthesized
ctcagtttggtattttttactg

SEQ ID NO: 71349 - DNA, 22 bp, Artificial Sequence
  chemically synthesized
tcagtttggtattttttactgc

SEQ ID NO: 71350 - DNA, 22 bp, Artificial Sequence
  chemically synthesized
agtttggtattttttactgctt

SEQ ID NO: 71351 - DNA, 22 bp, Artificial Sequence
  chemically synthesized
ggtattttttactgcttggaga

SEQ ID NO: 71352 - DNA, 22 bp, Artificial Sequence
  chemically synthesized
gtattttttactgcttggagat

SEQ ID NO: 71353 - DNA, 22 bp, Artificial Sequence
  chemically synthesized
tttactgcttggagatccagaa

SEQ ID NO: 71354 - DNA, 22 bp, Artificial Sequence
  chemically synthesized
ttactgcttggagatccagaag

SEQ ID NO: 71355 - DNA, 22 bp, Artificial Sequence
  chemically synthesized
tactgcttggagatccagaaga

SEQ ID NO: 71356 - DNA, 22 bp, Artificial Sequence
  chemically synthesized
actgcttggagatccagaagag

SEQ ID NO: 71357 - DNA, 22 bp, Artificial Sequence
  chemically synthesized
ctgcttggagatccagaagaga

SEQ ID NO: 71358 - DNA, 22 bp, Artificial Sequence
  chemically synthesized
cttggagatccagaagagaatt

SEQ ID NO: 71359 - DNA, 22 bp, Artificial Sequence
  chemically synthesized
ggagatccagaagagaattaga

SEQ ID NO: 71360 - DNA, 22 bp, Artificial Sequence
  chemically synthesized
gagatccagaagagaattagaa

SEQ ID NO: 71361 - DNA, 22 bp, Artificial Sequence
  chemically synthesized
gaaacaacatagcaaattaaaa

SEQ ID NO: 71362 - DNA, 22 bp, Artificial Sequence
  chemically synthesized
aaataggtttgtcaataataga

SEQ ID NO: 71363 - DNA, 22 bp, Artificial Sequence
  chemically synthesized
gtcaataatagagctcagacac

SEQ ID NO: 71364 - DNA, 22 bp, Artificial Sequence
  chemically synthesized
tcaataatagagctcagacacc

SEQ ID NO: 71365 - DNA, 22 bp, Artificial Sequence
  chemically synthesized
agacacctgtgtgctgtagatt

SEQ ID NO: 71366 - DNA, 22 bp, Artificial Sequence
  chemically synthesized
tgtgctgtagattcacatacag

SEQ ID NO: 71367 - DNA, 22 bp, Artificial Sequence
  chemically synthesized
tagattcacatacaggccgtga

SEQ ID NO: 71368 - DNA, 22 bp, Artificial Sequence
  chemically synthesized
acatacaggccgtgaacctaag

SEQ ID NO: 71369 - DNA, 22 bp, Artificial Sequence
  chemically synthesized
agtggggaaaatcctacctatc

SEQ ID NO: 71370 - DNA, 22 bp, Artificial Sequence
  chemically synthesized
cctatccaccttctggctagat

SEQ ID NO: 71371 - DNA, 22 bp, Artificial Sequence
  chemically synthesized
tccaccttctggctagattacc

SEQ ID NO: 71372 - DNA, 22 bp, Artificial Sequence
  chemically synthesized
ctggctagattacctagcttag

SEQ ID NO: 71373 - DNA, 22 bp, Artificial Sequence
  chemically synthesized
tggctagattacctagcttagt

SEQ ID NO: 71374 - DNA, 22 bp, Artificial Sequence
  chemically synthesized
gctagattacctagcttagtga

SEQ ID NO: 71375 - DNA, 22 bp, Artificial Sequence
  chemically synthesized
gattacctagcttagtgaaaag

SEQ ID NO: 71376 - DNA, 22 bp, Artificial Sequence
  chemically synthesized
cctagcttagtgaaaagatagc

SEQ ID NO: 71377 - DNA, 22 bp, Artificial Sequence
  chemically synthesized
gcttagtgaaaagatagccaaa

SEQ ID NO: 71378 - DNA, 22 bp, Artificial Sequence
  chemically synthesized
agtgaaaagatagccaaataat

SEQ ID NO: 71379 - DNA, 22 bp, Artificial Sequence
  chemically synthesized
gtgaaaagatagccaaataatt

SEQ ID NO: 71380 - DNA, 22 bp, Artificial Sequence
  chemically synthesized
gcatgtgaattatttcctgctt

SEQ ID NO: 71381 - DNA, 22 bp, Artificial Sequence
  chemically synthesized
tttcctgcttattcataataaa

SEQ ID NO: 71382 - DNA, 22 bp, Artificial Sequence
  chemically synthesized
cctgcttattcataataaataa

SEQ ID NO: 71383 - DNA, 22 bp, Artificial Sequence
  chemically synthesized
ctgcttattcataataaataat

SEQ ID NO: 71384 - DNA, 22 bp, Artificial Sequence
  chemically synthesized
cttattcataataaataatgac

SEQ ID NO: 71385 - DNA, 22 bp, Artificial Sequence
  chemically synthesized
attcataataaataatgactgt

SEQ ID NO: 71386 - DNA, 22 bp, Artificial Sequence
  chemically synthesized
ttcataataaataatgactgtc

SEQ ID NO: 71387 - DNA, 22 bp, Artificial Sequence
  chemically synthesized
ataataaataatgactgtctac

SEQ ID NO: 71388 - DNA, 22 bp, Artificial Sequence
  chemically synthesized
tctacagtagtgaactacctta

SEQ ID NO: 71389 - DNA, 22 bp, Artificial Sequence
  chemically synthesized
cagtagtgaactaccttatact

SEQ ID NO: 71390 - DNA, 22 bp, Artificial Sequence
  chemically synthesized
ccttatactgtatacagtgctg

SEQ ID NO: 71391 - DNA, 22 bp, Artificial Sequence
  chemically synthesized
atactgtatacagtgctgtctc

SEQ ID NO: 71392 - DNA, 22 bp, Artificial Sequence
  chemically synthesized
tactgtatacagtgctgtctcg

SEQ ID NO: 71393 - DNA, 22 bp, Artificial Sequence
  chemically synthesized
tatacagtgctgtctcgtgcat

SEQ ID NO: 71394 - DNA, 22 bp, Artificial Sequence
  chemically synthesized
tctcgtgcattatttcacctgc

SEQ ID NO: 71395 - DNA, 22 bp, Artificial Sequence
  chemically synthesized
gtgcattatttcacctgctctc

SEQ ID NO: 71396 - DNA, 22 bp, Artificial Sequence
  chemically synthesized
tttcacctgctctctgggacag

SEQ ID NO: 71397 - DNA, 22 bp, Artificial Sequence
  chemically synthesized
cacctgctctctgggacagatc

SEQ ID NO: 71398 - DNA, 22 bp, Artificial Sequence
  chemically synthesized
acctgctctctgggacagatct

SEQ ID NO: 71399 - DNA, 22 bp, Artificial Sequence
  chemically synthesized
ctctctgggacagatctcacga

SEQ ID NO: 71400 - DNA, 22 bp, Artificial Sequence
  chemically synthesized
tctgggacagatctcacgactt

SEQ ID NO: 71401 - DNA, 22 bp, Artificial Sequence
  chemically synthesized
tgggacagatctcacgacttct

SEQ ID NO: 71402 - DNA, 22 bp, Artificial Sequence
  chemically synthesized
ggacagatctcacgacttctac

SEQ ID NO: 71403 - DNA, 22 bp, Artificial Sequence
  chemically synthesized
acgacttctactttatggaggt

SEQ ID NO: 71404 - DNA, 22 bp, Artificial Sequence
  chemically synthesized
ctactttatggaggtggagatt

SEQ ID NO: 71405 - DNA, 22 bp, Artificial Sequence
  chemically synthesized
tactttatggaggtggagattg

SEQ ID NO: 71406 - DNA, 22 bp, Artificial Sequence
  chemically synthesized
ctttatggaggtggagattgag

SEQ ID NO: 71407 - DNA, 22 bp, Artificial Sequence
  chemically synthesized
tatggaggtggagattgaggct

SEQ ID NO: 71408 - DNA, 22 bp, Artificial Sequence
  chemically synthesized
atggaggtggagattgaggctt

SEQ ID NO: 71409 - DNA, 22 bp, Artificial Sequence
  chemically synthesized
tggaggtggagattgaggctta

SEQ ID NO: 71410 - DNA, 22 bp, Artificial Sequence
  chemically synthesized
aggcttaccaaggttaagggct

SEQ ID NO: 71411 - DNA, 22 bp, Artificial Sequence
  chemically synthesized
accaaggttaagggcttgccag

SEQ ID NO: 71412 - DNA, 22 bp, Artificial Sequence
  chemically synthesized
ccaaggttaagggcttgccaga

SEQ ID NO: 71413 - DNA, 22 bp, Artificial Sequence
  chemically synthesized
agggcttgccagaggccacatc

SEQ ID NO: 71414 - DNA, 22 bp, Artificial Sequence
  chemically synthesized
gccagaggccacatcagtaaga

SEQ ID NO: 71415 - DNA, 22 bp, Artificial Sequence
  chemically synthesized
ccagaggccacatcagtaagag

SEQ ID NO: 71416 - DNA, 22 bp, Artificial Sequence
  chemically synthesized
tctggtttcttgtccagagcta

SEQ ID NO: 71417 - DNA, 22 bp, Artificial Sequence
  chemically synthesized
ctggtttcttgtccagagctaa

SEQ ID NO: 71418 - DNA, 22 bp, Artificial Sequence
  chemically synthesized
tggtttcttgtccagagctaat

SEQ ID NO: 71419 - DNA, 22 bp, Artificial Sequence
  chemically synthesized
gtttcttgtccagagctaattt

SEQ ID NO: 71420 - DNA, 22 bp, Artificial Sequence
  chemically synthesized
cttgtccagagctaatttcacc

SEQ ID NO: 71421 - DNA, 22 bp, Artificial Sequence
  chemically synthesized
ttgtccagagctaatttcacca

SEQ ID NO: 71422 - DNA, 22 bp, Artificial Sequence
  chemically synthesized
gtccagagctaatttcaccaaa

SEQ ID NO: 71423 - DNA, 22 bp, Artificial Sequence
  chemically synthesized
tccagagctaatttcaccaaac

SEQ ID NO: 71424 - DNA, 22 bp, Artificial Sequence
  chemically synthesized
atttcaccaaactctgtttaac

SEQ ID NO: 71425 - DNA, 22 bp, Artificial Sequence
  chemically synthesized
caccaaactctgtttaactgat

SEQ ID NO: 71426 - DNA, 22 bp, Artificial Sequence
  chemically synthesized
accaaactctgtttaactgatc

SEQ ID NO: 71427 - DNA, 22 bp, Artificial Sequence
  chemically synthesized
tgtttaactgatcaaagggagt

SEQ ID NO: 71428 - DNA, 22 bp, Artificial Sequence
  chemically synthesized
tttaactgatcaaagggagtat

SEQ ID NO: 71429 - DNA, 22 bp, Artificial Sequence
  chemically synthesized
aactgatcaaagggagtatctt

SEQ ID NO: 71430 - DNA, 22 bp, Artificial Sequence
  chemically synthesized
actgatcaaagggagtatcttt

SEQ ID NO: 71431 - DNA, 22 bp, Artificial Sequence
  chemically synthesized
atcaaagggagtatcttttcct

SEQ ID NO: 71432 - DNA, 22 bp, Artificial Sequence
  chemically synthesized
ttcctgtgttagcacataagtc

SEQ ID NO: 71433 - DNA, 22 bp, Artificial Sequence
  chemically synthesized
tcctgtgttagcacataagtca

SEQ ID NO: 71434 - DNA, 22 bp, Artificial Sequence
  chemically synthesized
cctgtgttagcacataagtcat

SEQ ID NO: 71435 - DNA, 22 bp, Artificial Sequence
  chemically synthesized
ctgtgttagcacataagtcata

SEQ ID NO: 71436 - DNA, 22 bp, Artificial Sequence
  chemically synthesized
tgttagcacataagtcataaat

SEQ ID NO: 71437 - DNA, 22 bp, Artificial Sequence
  chemically synthesized
gcacataagtcataaatgttca

SEQ ID NO: 71438 - DNA, 22 bp, Artificial Sequence
  chemically synthesized
acagacacacacatgtggctta

SEQ ID NO: 71439 - DNA, 22 bp, Artificial Sequence
  chemically synthesized
acacatacagacccaggatggc

SEQ ID NO: 71440 - DNA, 22 bp, Artificial Sequence
  chemically synthesized
cacatacagacccaggatggcc

SEQ ID NO: 71441 - DNA, 22 bp, Artificial Sequence
  chemically synthesized
tggtaaaggcatgcagagttgc

SEQ ID NO: 71442 - DNA, 22 bp, Artificial Sequence
  chemically synthesized
ggtaaaggcatgcagagttgcc

SEQ ID NO: 71443 - DNA, 22 bp, Artificial Sequence
  chemically synthesized
gtaaaggcatgcagagttgcct

SEQ ID NO: 71444 - DNA, 22 bp, Artificial Sequence
  chemically synthesized
cctcttcctaccaacagatgtg

SEQ ID NO: 71445 - DNA, 22 bp, Artificial Sequence
  chemically synthesized
ttcctaccaacagatgtgtgca

SEQ ID NO: 71446 - DNA, 22 bp, Artificial Sequence
  chemically synthesized
cctaccaacagatgtgtgcact

SEQ ID NO: 71447 - DNA, 22 bp, Artificial Sequence
  chemically synthesized
ctaccaacagatgtgtgcactg

SEQ ID NO: 71448 - DNA, 22 bp, Artificial Sequence
  chemically synthesized
ccaacagatgtgtgcactgaga

SEQ ID NO: 71449 - DNA, 22 bp, Artificial Sequence
  chemically synthesized
agaaagggaggttgcagcctcc

SEQ ID NO: 71450 - DNA, 22 bp, Artificial Sequence
  chemically synthesized
cagcctccttgccatcaccttt

SEQ ID NO: 71451 - DNA, 22 bp, Artificial Sequence
  chemically synthesized
cttgccatcacctttcccctgt

SEQ ID NO: 71452 - DNA, 22 bp, Artificial Sequence
  chemically synthesized
gccatcacctttcccctgtggc

SEQ ID NO: 71453 - DNA, 22 bp, Artificial Sequence
  chemically synthesized
ccatcacctttcccctgtggct

SEQ ID NO: 71454 - DNA, 22 bp, Artificial Sequence
  chemically synthesized
tcccctgtggcttttccatgac

SEQ ID NO: 71455 - DNA, 22 bp, Artificial Sequence
  chemically synthesized
cccctgtggcttttccatgaca

SEQ ID NO: 71456 - DNA, 22 bp, Artificial Sequence
  chemically synthesized
ccctgtggcttttccatgacaa

SEQ ID NO: 71457 - DNA, 22 bp, Artificial Sequence
  chemically synthesized
tggcttttccatgacaaataac

SEQ ID NO: 71458 - DNA, 22 bp, Artificial Sequence
  chemically synthesized
ttccatgacaaataaccctgat

SEQ ID NO: 71459 - DNA, 22 bp, Artificial Sequence
  chemically synthesized
tccatgacaaataaccctgatt

SEQ ID NO: 71460 - DNA, 22 bp, Artificial Sequence
  chemically synthesized
ccatgacaaataaccctgattg

SEQ ID NO: 71461 - DNA, 22 bp, Artificial Sequence
  chemically synthesized
catgacaaataaccctgattgc

SEQ ID NO: 71462 - DNA, 22 bp, Artificial Sequence
  chemically synthesized
attgcacgagtggcctgtttgt

SEQ ID NO: 71463 - DNA, 22 bp, Artificial Sequence
  chemically synthesized
cacgagtggcctgtttgtgact

SEQ ID NO: 71464 - DNA, 22 bp, Artificial Sequence
  chemically synthesized
tttgtgacttcctatcaattag

SEQ ID NO: 71465 - DNA, 22 bp, Artificial Sequence
  chemically synthesized
gtgacttcctatcaattagttg

SEQ ID NO: 71466 - DNA, 22 bp, Artificial Sequence
  chemically synthesized
tgacttcctatcaattagttgg

SEQ ID NO: 71467 - DNA, 22 bp, Artificial Sequence
  chemically synthesized
cctatcaattagttgggacttc

SEQ ID NO: 71468 - DNA, 22 bp, Artificial Sequence
  chemically synthesized
ctatcaattagttgggacttcc

SEQ ID NO: 71469 - DNA, 22 bp, Artificial Sequence
  chemically synthesized
tcaattagttgggacttccaga

SEQ ID NO: 71470 - DNA, 22 bp, Artificial Sequence
  chemically synthesized
gttgggacttccagacaagaag

SEQ ID NO: 71471 - DNA, 22 bp, Artificial Sequence
  chemically synthesized
ggacttccagacaagaagttat

SEQ ID NO: 71472 - DNA, 22 bp, Artificial Sequence
  chemically synthesized
ccagacaagaagttatttcata

SEQ ID NO: 71473 - DNA, 22 bp, Artificial Sequence
  chemically synthesized
cagacaagaagttatttcataa

SEQ ID NO: 71474 - DNA, 22 bp, Artificial Sequence
  chemically synthesized
tttcataaagaaaccctctccc

SEQ ID NO: 71475 - DNA, 22 bp, Artificial Sequence
  chemically synthesized
cataaagaaaccctctccctgc

SEQ ID NO: 71476 - DNA, 22 bp, Artificial Sequence
  chemically synthesized
ataaagaaaccctctccctgcc

SEQ ID NO: 71477 - DNA, 22 bp, Artificial Sequence
  chemically synthesized
tccctgccccatgctctgccta

SEQ ID NO: 71478 - DNA, 22 bp, Artificial Sequence
  chemically synthesized
cctgccccatgctctgcctatg

SEQ ID NO: 71479 - DNA, 22 bp, Artificial Sequence
  chemically synthesized
ccccatgctctgcctatgtgtt

SEQ ID NO: 71480 - DNA, 22 bp, Artificial Sequence
  chemically synthesized
tgcctatgtgttgctgaaacat

SEQ ID NO: 71481 - DNA, 22 bp, Artificial Sequence
  chemically synthesized
cctatgtgttgctgaaacataa

SEQ ID NO: 71482 - DNA, 22 bp, Artificial Sequence
  chemically synthesized
tgtgttgctgaaacataagacc

SEQ ID NO: 71483 - DNA, 22 bp, Artificial Sequence
  chemically synthesized
ctgaaacataagaccattaggg

SEQ ID NO: 71484 - DNA, 22 bp, Artificial Sequence
  chemically synthesized
aaacataagaccattagggttt

SEQ ID NO: 71485 - DNA, 22 bp, Artificial Sequence
  chemically synthesized
gggtttctgtgatggcttcctc

SEQ ID NO: 71486 - DNA, 22 bp, Artificial Sequence
  chemically synthesized
ctgtgatggcttcctccctaaa

SEQ ID NO: 71487 - DNA, 22 bp, Artificial Sequence
  chemically synthesized
tgtgatggcttcctccctaaat

SEQ ID NO: 71488 - DNA, 22 bp, Artificial Sequence
  chemically synthesized
tgatggcttcctccctaaatgt

SEQ ID NO: 71489 - DNA, 22 bp, Artificial Sequence
  chemically synthesized
cctccctaaatgtgctgaactc

SEQ ID NO: 71490 - DNA, 22 bp, Artificial Sequence
  chemically synthesized
ctccctaaatgtgctgaactcc

SEQ ID NO: 71491 - DNA, 22 bp, Artificial Sequence
  chemically synthesized
cctaaatgtgctgaactccttg

SEQ ID NO: 71492 - DNA, 22 bp, Artificial Sequence
  chemically synthesized
aatgtgctgaactccttgctga

SEQ ID NO: 71493 - DNA, 22 bp, Artificial Sequence
  chemically synthesized
aactccttgctgatgcctagaa

SEQ ID NO: 71494 - DNA, 22 bp, Artificial Sequence
  chemically synthesized
cttgctgatgcctagaaagagt

SEQ ID NO: 71495 - DNA, 22 bp, Artificial Sequence
  chemically synthesized
gctgatgcctagaaagagtgac

SEQ ID NO: 71496 - DNA, 22 bp, Artificial Sequence
  chemically synthesized
ctgatgcctagaaagagtgaca

SEQ ID NO: 71497 - DNA, 22 bp, Artificial Sequence
  chemically synthesized
atgcctagaaagagtgacacca

SEQ ID NO: 71498 - DNA, 22 bp, Artificial Sequence
  chemically synthesized
gaaagagtgacaccacttccaa

SEQ ID NO: 71499 - DNA, 22 bp, Artificial Sequence
  chemically synthesized
ccaaagggaggccagaactgaa

SEQ ID NO: 71500 - DNA, 22 bp, Artificial Sequence
  chemically synthesized
caaagggaggccagaactgaaa

SEQ ID NO: 71501 - DNA, 22 bp, Artificial Sequence
  chemically synthesized
aaacaacaatcctgggtcttga

SEQ ID NO: 71502 - DNA, 22 bp, Artificial Sequence
  chemically synthesized
ggtcttgagacaagttcagcct

SEQ ID NO: 71503 - DNA, 22 bp, Artificial Sequence
  chemically synthesized
gagacaagttcagcctttgtaa

SEQ ID NO: 71504 - DNA, 22 bp, Artificial Sequence
  chemically synthesized
agacaagttcagcctttgtaac

SEQ ID NO: 71505 - DNA, 22 bp, Artificial Sequence
  chemically synthesized
agcctttgtaactgcacttggt

SEQ ID NO: 71506 - DNA, 22 bp, Artificial Sequence
  chemically synthesized
tgtaactgcacttggtggtcac

SEQ ID NO: 71507 - DNA, 22 bp, Artificial Sequence
  chemically synthesized
gtaactgcacttggtggtcact

SEQ ID NO: 71508 - DNA, 22 bp, Artificial Sequence
  chemically synthesized
taactgcacttggtggtcacta

SEQ ID NO: 71509 - DNA, 22 bp, Artificial Sequence
  chemically synthesized
cacttggtggtcactacacttt

SEQ ID NO: 71510 - DNA, 22 bp, Artificial Sequence
  chemically synthesized
ggtggtcactacactttcattt

SEQ ID NO: 71511 - DNA, 22 bp, Artificial Sequence
  chemically synthesized
gtggtcactacactttcatttc

SEQ ID NO: 71512 - DNA, 22 bp, Artificial Sequence
  chemically synthesized
cactttcatttctggtctgtgt

SEQ ID NO: 71513 - DNA, 22 bp, Artificial Sequence
  chemically synthesized
tcatttctggtctgtgtttcta

SEQ ID NO: 71514 - DNA, 22 bp, Artificial Sequence
  chemically synthesized
catttctggtctgtgtttctac

SEQ ID NO: 71515 - DNA, 22 bp, Artificial Sequence
  chemically synthesized
atttctggtctgtgtttctacc

SEQ ID NO: 71516 - DNA, 22 bp, Artificial Sequence
  chemically synthesized
ctggtctgtgtttctaccccca

SEQ ID NO: 71517 - DNA, 22 bp, Artificial Sequence
  chemically synthesized
tggtctgtgtttctacccccac

SEQ ID NO: 71518 - DNA, 22 bp, Artificial Sequence
  chemically synthesized
gtctgtgtttctacccccactt

SEQ ID NO: 71519 - DNA, 22 bp, Artificial Sequence
  chemically synthesized
tgtttctacccccactttttat

SEQ ID NO: 71520 - DNA, 22 bp, Artificial Sequence
  chemically synthesized
ctacccccactttttatatatt

SEQ ID NO: 71521 - DNA, 22 bp, Artificial Sequence
  chemically synthesized
tacccccactttttatatattt

SEQ ID NO: 71522 - DNA, 22 bp, Artificial Sequence
  chemically synthesized
cccccactttttatatatttct

SEQ ID NO: 71523 - DNA, 22 bp, Artificial Sequence
  chemically synthesized
tttatatatttcttctcagagt

SEQ ID NO: 71524 - DNA, 22 bp, Artificial Sequence
  chemically synthesized
ttatatatttcttctcagagtc

SEQ ID NO: 71525 - DNA, 22 bp, Artificial Sequence
  chemically synthesized
tatatatttcttctcagagtca

SEQ ID NO: 71526 - DNA, 22 bp, Artificial Sequence
  chemically synthesized
atatatttcttctcagagtcag

SEQ ID NO: 71527 - DNA, 22 bp, Artificial Sequence
  chemically synthesized
tatatttcttctcagagtcagt

SEQ ID NO: 71528 - DNA, 22 bp, Artificial Sequence
  chemically synthesized
cttctcagagtcagtttgtaaa

SEQ ID NO: 71529 - DNA, 22 bp, Artificial Sequence
  chemically synthesized
ttctcagagtcagtttgtaaat

SEQ ID NO: 71530 - DNA, 22 bp, Artificial Sequence
  chemically synthesized
ctcagagtcagtttgtaaataa

SEQ ID NO: 71531 - DNA, 22 bp, Artificial Sequence
  chemically synthesized
tcagagtcagtttgtaaataag

SEQ ID NO: 71532 - DNA, 22 bp, Artificial Sequence
  chemically synthesized
agagtcagtttgtaaataagtg

SEQ ID NO: 71533 - DNA, 22 bp, Artificial Sequence
  chemically synthesized
gtaaataagtggatatctctaa

SEQ ID NO: 71534 - DNA, 22 bp, Artificial Sequence
  chemically synthesized
taaataagtggatatctctaaa

SEQ ID NO: 71535 - DNA, 22 bp, Artificial Sequence
  chemically synthesized
taaaagtgggatttttaagggg

SEQ ID NO: 71536 - DNA, 22 bp, Artificial Sequence
  chemically synthesized
aaagtgggatttttaaggggca

SEQ ID NO: 71537 - DNA, 22 bp, Artificial Sequence
  chemically synthesized
ttaaggggcaagaggataacag

SEQ ID NO: 71538 - DNA, 22 bp, Artificial Sequence
  chemically synthesized
taaggggcaagaggataacaga

SEQ ID NO: 71539 - DNA, 22 bp, Artificial Sequence
  chemically synthesized
aaggggcaagaggataacagaa

SEQ ID NO: 71540 - DNA, 22 bp, Artificial Sequence
  chemically synthesized
aggggcaagaggataacagaag

SEQ ID NO: 71541 - DNA, 22 bp, Artificial Sequence
  chemically synthesized
ttttatcctcttcactgtggag

SEQ ID NO: 71542 - DNA, 22 bp, Artificial Sequence
  chemically synthesized
tatcctcttcactgtggagaag

SEQ ID NO: 71543 - DNA, 22 bp, Artificial Sequence
  chemically synthesized
atcctcttcactgtggagaaga

SEQ ID NO: 71544 - DNA, 22 bp, Artificial Sequence
  chemically synthesized
tcctcttcactgtggagaagaa

SEQ ID NO: 71545 - DNA, 22 bp, Artificial Sequence
  chemically synthesized
ttcactgtggagaagaaccccc

SEQ ID NO: 71546 - DNA, 22 bp, Artificial Sequence
  chemically synthesized
cactgtggagaagaaccccctc

SEQ ID NO: 71547 - DNA, 22 bp, Artificial Sequence
  chemically synthesized
actgtggagaagaaccccctca

SEQ ID NO: 71548 - DNA, 22 bp, Artificial Sequence
  chemically synthesized
tggagaagaaccccctcaaaac

SEQ ID NO: 71549 - DNA, 22 bp, Artificial Sequence
  chemically synthesized
aaaacaaacagaacaaaaagac

SEQ ID NO: 71550 - DNA, 22 bp, Artificial Sequence
  chemically synthesized
tcttttcccatggcttttaaag

SEQ ID NO: 71551 - DNA, 22 bp, Artificial Sequence
  chemically synthesized
ttcccatggcttttaaagttga

SEQ ID NO: 71552 - DNA, 22 bp, Artificial Sequence
  chemically synthesized
tcccatggcttttaaagttgaa

SEQ ID NO: 71553 - DNA, 22 bp, Artificial Sequence
  chemically synthesized
cccatggcttttaaagttgaaa

SEQ ID NO: 71554 - DNA, 22 bp, Artificial Sequence
  chemically synthesized
ccatggcttttaaagttgaaag

SEQ ID NO: 71555 - DNA, 22 bp, Artificial Sequence
  chemically synthesized
ttaaagttgaaagacaacaaaa

SEQ ID NO: 71556 - DNA, 22 bp, Artificial Sequence
  chemically synthesized
taaagttgaaagacaacaaaaa

SEQ ID NO: 71557 - DNA, 22 bp, Artificial Sequence
  chemically synthesized
aaagttgaaagacaacaaaaat

SEQ ID NO: 71558 - DNA, 22 bp, Artificial Sequence
  chemically synthesized
aagttgaaagacaacaaaaatt

SEQ ID NO: 71559 - DNA, 22 bp, Artificial Sequence
  chemically synthesized
aaagacaacaaaaatttattta

SEQ ID NO: 71560 - DNA, 22 bp, Artificial Sequence
  chemically synthesized
atttacagaatttattaggaaa

SEQ ID NO: 71561 - DNA, 22 bp, Artificial Sequence
  chemically synthesized
tttacagaatttattaggaaac

SEQ ID NO: 71562 - DNA, 22 bp, Artificial Sequence
  chemically synthesized
acagaatttattaggaaacggt

SEQ ID NO: 71563 - DNA, 22 bp, Artificial Sequence
  chemically synthesized
cagaatttattaggaaacggta

SEQ ID NO: 71564 - DNA, 22 bp, Artificial Sequence
  chemically synthesized
attaggaaacggtattgtgtta

SEQ ID NO: 71565 - DNA, 22 bp, Artificial Sequence
  chemically synthesized
ttaggaaacggtattgtgttag

SEQ ID NO: 71566 - DNA, 22 bp, Artificial Sequence
  chemically synthesized
ggaaacggtattgtgttagggc

SEQ ID NO: 71567 - DNA, 22 bp, Artificial Sequence
  chemically synthesized
tgttagggctagccattttttt

SEQ ID NO: 71568 - DNA, 22 bp, Artificial Sequence
  chemically synthesized
gggctagccatttttttttttt

SEQ ID NO: 71569 - DNA, 22 bp, Artificial Sequence
  chemically synthesized
gccatttttttttttttttttt

SEQ ID NO: 71570 - DNA, 22 bp, Artificial Sequence
  chemically synthesized
tttttttttttttttttttttt

SEQ ID NO: 71571 - DNA, 22 bp, Artificial Sequence
  chemically synthesized
ttttttttttttttttttttta

SEQ ID NO: 71572 - DNA, 22 bp, Artificial Sequence
  chemically synthesized
ttttttttttttttttttttaa

SEQ ID NO: 71573 - DNA, 22 bp, Artificial Sequence
  chemically synthesized
tttttttttttttttttttaag

SEQ ID NO: 71574 - DNA, 22 bp, Artificial Sequence
  chemically synthesized
ttttttttttttttttttaaga

SEQ ID NO: 71575 - DNA, 22 bp, Artificial Sequence
  chemically synthesized
tttttttttttttttttaagac

SEQ ID NO: 71576 - DNA, 22 bp, Artificial Sequence
  chemically synthesized
ttttttttttttttttaagaca

SEQ ID NO: 71577 - DNA, 22 bp, Artificial Sequence
  chemically synthesized
tttttttttttttttaagacag

SEQ ID NO: 71578 - DNA, 22 bp, Artificial Sequence
  chemically synthesized
ttttttttttttttaagacaga

SEQ ID NO: 71579 - DNA, 22 bp, Artificial Sequence
  chemically synthesized
tttttttttttttaagacagaa

SEQ ID NO: 71580 - DNA, 22 bp, Artificial Sequence
  chemically synthesized
ttttttttttttaagacagaat

SEQ ID NO: 71581 - DNA, 22 bp, Artificial Sequence
  chemically synthesized
tttttttttttaagacagaatc

SEQ ID NO: 71582 - DNA, 22 bp, Artificial Sequence
  chemically synthesized
ttttttttttaagacagaatct

SEQ ID NO: 71583 - DNA, 22 bp, Artificial Sequence
  chemically synthesized
tttttttttaagacagaatctc

SEQ ID NO: 71584 - DNA, 22 bp, Artificial Sequence
  chemically synthesized
ttttttttaagacagaatctcg

SEQ ID NO: 71585 - DNA, 22 bp, Artificial Sequence
  chemically synthesized
tttttttaagacagaatctcgc

SEQ ID NO: 71586 - DNA, 22 bp, Artificial Sequence
  chemically synthesized
ttttttaagacagaatctcgct

SEQ ID NO: 71587 - DNA, 22 bp, Artificial Sequence
  chemically synthesized
tttttaagacagaatctcgctc

SEQ ID NO: 71588 - DNA, 22 bp, Artificial Sequence
  chemically synthesized
ttttaagacagaatctcgctct

SEQ ID NO: 71589 - DNA, 22 bp, Artificial Sequence
  chemically synthesized
tttaagacagaatctcgctctg

SEQ ID NO: 71590 - DNA, 22 bp, Artificial Sequence
  chemically synthesized
ttaagacagaatctcgctctgt

SEQ ID NO: 71591 - DNA, 22 bp, Artificial Sequence
  chemically synthesized
taagacagaatctcgctctgtc

SEQ ID NO: 71592 - DNA, 22 bp, Artificial Sequence
  chemically synthesized
aagacagaatctcgctctgtca

SEQ ID NO: 71593 - DNA, 22 bp, Artificial Sequence
  chemically synthesized
agacagaatctcgctctgtcac

SEQ ID NO: 71594 - DNA, 22 bp, Artificial Sequence
  chemically synthesized
gctctgtcacccaggctggagt

SEQ ID NO: 71595 - DNA, 22 bp, Artificial Sequence
  chemically synthesized
tgtcacccaggctggagtgcag

SEQ ID NO: 71596 - DNA, 22 bp, Artificial Sequence
  chemically synthesized
tcacccaggctggagtgcagtg

SEQ ID NO: 71597 - DNA, 22 bp, Artificial Sequence
  chemically synthesized
gagtgcagtggcaaggactcag

SEQ ID NO: 71598 - DNA, 22 bp, Artificial Sequence
  chemically synthesized
agctcaccacaacctccgccta

SEQ ID NO: 71599 - DNA, 22 bp, Artificial Sequence
  chemically synthesized
accacaacctccgcctactggg

SEQ ID NO: 71600 - DNA, 22 bp, Artificial Sequence
  chemically synthesized
cgcctactgggttcaagggatc

SEQ ID NO: 71601 - DNA, 22 bp, Artificial Sequence
  chemically synthesized
ctgggttcaagggatcctcctg

SEQ ID NO: 71602 - DNA, 22 bp, Artificial Sequence
  chemically synthesized
ggttcaagggatcctcctgcct

SEQ ID NO: 71603 - DNA, 22 bp, Artificial Sequence
  chemically synthesized
aagggatcctcctgcctcagct

SEQ ID NO: 71604 - DNA, 22 bp, Artificial Sequence
  chemically synthesized
ctgcctcagcttcccaagtagc

SEQ ID NO: 71605 - DNA, 22 bp, Artificial Sequence
  chemically synthesized
cctcagcttcccaagtagctgg

SEQ ID NO: 71606 - DNA, 22 bp, Artificial Sequence
  chemically synthesized
agcttcccaagtagctgggact

SEQ ID NO: 71607 - DNA, 22 bp, Artificial Sequence
  chemically synthesized
cccaagtagctgggactacagg

SEQ ID NO: 71608 - DNA, 22 bp, Artificial Sequence
  chemically synthesized
ccaagtagctgggactacaggc

SEQ ID NO: 71609 - DNA, 22 bp, Artificial Sequence
  chemically synthesized
ggactacaggcacgcgccacca

SEQ ID NO: 71610 - DNA, 22 bp, Artificial Sequence
  chemically synthesized
caggcacgcgccaccacgccca

SEQ ID NO: 71611 - DNA, 22 bp, Artificial Sequence
  chemically synthesized
atattttttgtatttttagtag

SEQ ID NO: 71612 - DNA, 22 bp, Artificial Sequence
  chemically synthesized
tttgtatttttagtagatacgg

SEQ ID NO: 71613 - DNA, 22 bp, Artificial Sequence
  chemically synthesized
ttgtatttttagtagatacggc

SEQ ID NO: 71614 - DNA, 22 bp, Artificial Sequence
  chemically synthesized
tgtatttttagtagatacggcg

SEQ ID NO: 71615 - DNA, 22 bp, Artificial Sequence
  chemically synthesized
gtatttttagtagatacggcgt

SEQ ID NO: 71616 - DNA, 22 bp, Artificial Sequence
  chemically synthesized
tatttttagtagatacggcgtt

SEQ ID NO: 71617 - DNA, 22 bp, Artificial Sequence
  chemically synthesized
ttagtagatacggcgtttcacc

SEQ ID NO: 71618 - DNA, 22 bp, Artificial Sequence
  chemically synthesized
tagtagatacggcgtttcaccg

SEQ ID NO: 71619 - DNA, 22 bp, Artificial Sequence
  chemically synthesized
agtagatacggcgtttcaccgt

SEQ ID NO: 71620 - DNA, 22 bp, Artificial Sequence
  chemically synthesized
gtagatacggcgtttcaccgtg

SEQ ID NO: 71621 - DNA, 22 bp, Artificial Sequence
  chemically synthesized
caccgtgttagccaggatggtc

SEQ ID NO: 71622 - DNA, 22 bp, Artificial Sequence
  chemically synthesized
accgtgttagccaggatggtct

SEQ ID NO: 71623 - DNA, 22 bp, Artificial Sequence
  chemically synthesized
gccaggatggtctccatctcct

SEQ ID NO: 71624 - DNA, 22 bp, Artificial Sequence
  chemically synthesized
catctcctgatctcgtgatcca

SEQ ID NO: 71625 - DNA, 22 bp, Artificial Sequence
  chemically synthesized
ctgatctcgtgatccaccctcc

SEQ ID NO: 71626 - DNA, 22 bp, Artificial Sequence
  chemically synthesized
atctcgtgatccaccctcctag

SEQ ID NO: 71627 - DNA, 22 bp, Artificial Sequence
  chemically synthesized
gtgatccaccctcctaggcctc

SEQ ID NO: 71628 - DNA, 22 bp, Artificial Sequence
  chemically synthesized
ctaggcctcccatagtgctggg

SEQ ID NO: 71629 - DNA, 22 bp, Artificial Sequence
  chemically synthesized
ggcctcccatagtgctgggatt

SEQ ID NO: 71630 - DNA, 22 bp, Artificial Sequence
  chemically synthesized
ccatagtgctgggattagaggc

SEQ ID NO: 71631 - DNA, 22 bp, Artificial Sequence
  chemically synthesized
ggattagaggcattgcactacc

SEQ ID NO: 71632 - DNA, 22 bp, Artificial Sequence
  chemically synthesized
gaggcattgcactacctcacct

SEQ ID NO: 71633 - DNA, 22 bp, Artificial Sequence
  chemically synthesized
cactacctcacctggcctaggg

SEQ ID NO: 71634 - DNA, 22 bp, Artificial Sequence
  chemically synthesized
cctcacctggcctagggctaga

SEQ ID NO: 71635 - DNA, 22 bp, Artificial Sequence
  chemically synthesized
acctggcctagggctagacttt

SEQ ID NO: 71636 - DNA, 22 bp, Artificial Sequence
  chemically synthesized
gcctagggctagacttttgaaa

SEQ ID NO: 71637 - DNA, 22 bp, Artificial Sequence
  chemically synthesized
gggctagacttttgaaacccca

SEQ ID NO: 71638 - DNA, 22 bp, Artificial Sequence
  chemically synthesized
gacttttgaaaccccatacaag

SEQ ID NO: 71639 - DNA, 22 bp, Artificial Sequence
  chemically synthesized
ttgaaaccccatacaagattga

SEQ ID NO: 71640 - DNA, 22 bp, Artificial Sequence
  chemically synthesized
tgaaaccccatacaagattgac

SEQ ID NO: 71641 - DNA, 22 bp, Artificial Sequence
  chemically synthesized
gaaaccccatacaagattgaca

SEQ ID NO: 71642 - DNA, 22 bp, Artificial Sequence
  chemically synthesized
aaaccccatacaagattgacaa

SEQ ID NO: 71643 - DNA, 22 bp, Artificial Sequence
  chemically synthesized
acaatttgggaagacatctctc

SEQ ID NO: 71644 - DNA, 22 bp, Artificial Sequence
  chemically synthesized
gggaagacatctctctgtgtga

SEQ ID NO: 71645 - DNA, 22 bp, Artificial Sequence
  chemically synthesized
ggaagacatctctctgtgtgat

SEQ ID NO: 71646 - DNA, 22 bp, Artificial Sequence
  chemically synthesized
tctgtgtgatgagtcaagatca

SEQ ID NO: 71647 - DNA, 22 bp, Artificial Sequence
  chemically synthesized
tgtgtgatgagtcaagatcatg

SEQ ID NO: 71648 - DNA, 22 bp, Artificial Sequence
  chemically synthesized
tgtgatgagtcaagatcatggt

SEQ ID NO: 71649 - DNA, 22 bp, Artificial Sequence
  chemically synthesized
tccatgaatggcagaagcaggg

SEQ ID NO: 71650 - DNA, 22 bp, Artificial Sequence
  chemically synthesized
acaaatctgccaggggttctca

SEQ ID NO: 71651 - DNA, 22 bp, Artificial Sequence
  chemically synthesized
ccaggggttctcactgtgtcct

SEQ ID NO: 71652 - DNA, 22 bp, Artificial Sequence
  chemically synthesized
tcactgtgtcctctctgcagag

SEQ ID NO: 71653 - DNA, 22 bp, Artificial Sequence
  chemically synthesized
actgtgtcctctctgcagagtg

SEQ ID NO: 71654 - DNA, 22 bp, Artificial Sequence
  chemically synthesized
tgtcctctctgcagagtggaac

SEQ ID NO: 71655 - DNA, 22 bp, Artificial Sequence
  chemically synthesized
tctgcagagtggaacttcagat

SEQ ID NO: 71656 - DNA, 22 bp, Artificial Sequence
  chemically synthesized
tgcagagtggaacttcagattg

SEQ ID NO: 71657 - DNA, 22 bp, Artificial Sequence
  chemically synthesized
cagagtggaacttcagattgca

SEQ ID NO: 71658 - DNA, 22 bp, Artificial Sequence
  chemically synthesized
cagattgcagagagataaattg

SEQ ID NO: 71659 - DNA, 22 bp, Artificial Sequence
  chemically synthesized
agattgcagagagataaattgg

SEQ ID NO: 71660 - DNA, 22 bp, Artificial Sequence
  chemically synthesized
cagagagataaattggttgcct

SEQ ID NO: 71661 - DNA, 22 bp, Artificial Sequence
  chemically synthesized
gttgcctgacatgagcacagac

SEQ ID NO: 71662 - DNA, 22 bp, Artificial Sequence
  chemically synthesized
cctgacatgagcacagactaga

SEQ ID NO: 71663 - DNA, 22 bp, Artificial Sequence
  chemically synthesized
acatgagcacagactagaggac

SEQ ID NO: 71664 - DNA, 22 bp, Artificial Sequence
  chemically synthesized
gaggacagagtcccagccactt

SEQ ID NO: 71665 - DNA, 22 bp, Artificial Sequence
  chemically synthesized
ggatggaggagaccaaatacag

SEQ ID NO: 71666 - DNA, 22 bp, Artificial Sequence
  chemically synthesized
gatggaggagaccaaatacagg

SEQ ID NO: 71667 - DNA, 22 bp, Artificial Sequence
  chemically synthesized
tttttactttcccaagcctttt

SEQ ID NO: 71668 - DNA, 22 bp, Artificial Sequence
  chemically synthesized
ttactttcccaagccttttgtg

SEQ ID NO: 71669 - DNA, 22 bp, Artificial Sequence
  chemically synthesized
tactttcccaagccttttgtgg

SEQ ID NO: 71670 - DNA, 22 bp, Artificial Sequence
  chemically synthesized
actttcccaagccttttgtggg

SEQ ID NO: 71671 - DNA, 22 bp, Artificial Sequence
  chemically synthesized
ctttcccaagccttttgtgggc

SEQ ID NO: 71672 - DNA, 22 bp, Artificial Sequence
  chemically synthesized
tcccaagccttttgtgggctgt

SEQ ID NO: 71673 - DNA, 22 bp, Artificial Sequence
  chemically synthesized
cccaagccttttgtgggctgtt

SEQ ID NO: 71674 - DNA, 22 bp, Artificial Sequence
  chemically synthesized
ccaagccttttgtgggctgttc

SEQ ID NO: 71675 - DNA, 22 bp, Artificial Sequence
  chemically synthesized
ttgtgggctgttcagattatta

SEQ ID NO: 71676 - DNA, 22 bp, Artificial Sequence
  chemically synthesized
tgtgggctgttcagattattat

SEQ ID NO: 71677 - DNA, 22 bp, Artificial Sequence
  chemically synthesized
gtgggctgttcagattattatt

SEQ ID NO: 71678 - DNA, 22 bp, Artificial Sequence
  chemically synthesized
tgggctgttcagattattatta

SEQ ID NO: 71679 - DNA, 22 bp, Artificial Sequence
  chemically synthesized
ttcagattattattattattat

SEQ ID NO: 71680 - DNA, 22 bp, Artificial Sequence
  chemically synthesized
agattattattattattattat

SEQ ID NO: 71681 - DNA, 22 bp, Artificial Sequence
  chemically synthesized
ttattattattattattattat

SEQ ID NO: 71682 - DNA, 22 bp, Artificial Sequence
  chemically synthesized
ttattattattattattattat

SEQ ID NO: 71683 - DNA, 22 bp, Artificial Sequence
  chemically synthesized
ttattattattattattattat

SEQ ID NO: 71684 - DNA, 22 bp, Artificial Sequence
  chemically synthesized
ttattattattattattattat

SEQ ID NO: 71685 - DNA, 22 bp, Artificial Sequence
  chemically synthesized
ttattattattattattattat

SEQ ID NO: 71686 - DNA, 22 bp, Artificial Sequence
  chemically synthesized
ttattattattattattattat

SEQ ID NO: 71687 - DNA, 22 bp, Artificial Sequence
  chemically synthesized
ttattattattattattattat

SEQ ID NO: 71688 - DNA, 22 bp, Artificial Sequence
  chemically synthesized
ttattattattattattattat

SEQ ID NO: 71689 - DNA, 22 bp, Artificial Sequence
  chemically synthesized
ttattattattattattattgt

SEQ ID NO: 71690 - DNA, 22 bp, Artificial Sequence
  chemically synthesized
ttattattattattattgttga

SEQ ID NO: 71691 - DNA, 22 bp, Artificial Sequence
  chemically synthesized
ttattattattattgttgagat

SEQ ID NO: 71692 - DNA, 22 bp, Artificial Sequence
  chemically synthesized
ttattattattgttgagatgga

SEQ ID NO: 71693 - DNA, 22 bp, Artificial Sequence
  chemically synthesized
ttattattgttgagatggagtc

SEQ ID NO: 71694 - DNA, 22 bp, Artificial Sequence
  chemically synthesized
ttattgttgagatggagtctca

SEQ ID NO: 71695 - DNA, 22 bp, Artificial Sequence
  chemically synthesized
ttgttgagatggagtctcactc

SEQ ID NO: 71696 - DNA, 22 bp, Artificial Sequence
  chemically synthesized
ttgagatggagtctcactctat

SEQ ID NO: 71697 - DNA, 22 bp, Artificial Sequence
  chemically synthesized
agatggagtctcactctattgc

SEQ ID NO: 71698 - DNA, 22 bp, Artificial Sequence
  chemically synthesized
actctattgcccaggctggagt

SEQ ID NO: 71699 - DNA, 22 bp, Artificial Sequence
  chemically synthesized
tattgcccaggctggagtgcaa

SEQ ID NO: 71700 - DNA, 22 bp, Artificial Sequence
  chemically synthesized
ttgcccaggctggagtgcaatg

SEQ ID NO: 71701 - DNA, 22 bp, Artificial Sequence
  chemically synthesized
cccaggctggagtgcaatggca

SEQ ID NO: 71702 - DNA, 22 bp, Artificial Sequence
  chemically synthesized
gagtgcaatggcacgatcttgg

SEQ ID NO: 71703 - DNA, 22 bp, Artificial Sequence
  chemically synthesized
ggctcactgcaacctctacctc

SEQ ID NO: 71704 - DNA, 22 bp, Artificial Sequence
  chemically synthesized
gctcactgcaacctctacctcc

SEQ ID NO: 71705 - DNA, 22 bp, Artificial Sequence
  chemically synthesized
actgcaacctctacctcccggg

SEQ ID NO: 71706 - DNA, 22 bp, Artificial Sequence
  chemically synthesized
caacctctacctcccgggttca

SEQ ID NO: 71707 - DNA, 22 bp, Artificial Sequence
  chemically synthesized
tacctcccgggttcaagtggtt

SEQ ID NO: 71708 - DNA, 22 bp, Artificial Sequence
  chemically synthesized
cctcccgggttcaagtggttct

SEQ ID NO: 71709 - DNA, 22 bp, Artificial Sequence
  chemically synthesized
ccgggttcaagtggttctcctg

SEQ ID NO: 71710 - DNA, 22 bp, Artificial Sequence
  chemically synthesized
aagtggttctcctgcctcagcc

SEQ ID NO: 71711 - DNA, 22 bp, Artificial Sequence
  chemically synthesized
tcctgcctcagcctcctgagtg

SEQ ID NO: 71712 - DNA, 22 bp, Artificial Sequence
  chemically synthesized
ctgcctcagcctcctgagtggc

SEQ ID NO: 71713 - DNA, 22 bp, Artificial Sequence
  chemically synthesized
cctcagcctcctgagtggctgg

SEQ ID NO: 71714 - DNA, 22 bp, Artificial Sequence
  chemically synthesized
agcctcctgagtggctgggatt

SEQ ID NO: 71715 - DNA, 22 bp, Artificial Sequence
  chemically synthesized
ctgagtggctgggattacaggt

SEQ ID NO: 71716 - DNA, 22 bp, Artificial Sequence
  chemically synthesized
agtggctgggattacaggtgcg

SEQ ID NO: 71717 - DNA, 22 bp, Artificial Sequence
  chemically synthesized
ggattacaggtgcgtaccacct

SEQ ID NO: 71718 - DNA, 22 bp, Artificial Sequence
  chemically synthesized
caggtgcgtaccacctggctaa

SEQ ID NO: 71719 - DNA, 22 bp, Artificial Sequence
  chemically synthesized
gctaatttttgtatttttagta

SEQ ID NO: 71720 - DNA, 22 bp, Artificial Sequence
  chemically synthesized
atttttgtatttttagtagaga

SEQ ID NO: 71721 - DNA, 22 bp, Artificial Sequence
  chemically synthesized
ttgtatttttagtagagacggg

SEQ ID NO: 71722 - DNA, 22 bp, Artificial Sequence
  chemically synthesized
tgtatttttagtagagacgggg

SEQ ID NO: 71723 - DNA, 22 bp, Artificial Sequence
  chemically synthesized
gtatttttagtagagacggggt

SEQ ID NO: 71724 - DNA, 22 bp, Artificial Sequence
  chemically synthesized
tatttttagtagagacggggtt

SEQ ID NO: 71725 - DNA, 22 bp, Artificial Sequence
  chemically synthesized
ttagtagagacggggtttcacc

SEQ ID NO: 71726 - DNA, 22 bp, Artificial Sequence
  chemically synthesized
tagtagagacggggtttcacca

SEQ ID NO: 71727 - DNA, 22 bp, Artificial Sequence
  chemically synthesized
agtagagacggggtttcaccat

SEQ ID NO: 71728 - DNA, 22 bp, Artificial Sequence
  chemically synthesized
gtagagacggggtttcaccatg

SEQ ID NO: 71729 - DNA, 22 bp, Artificial Sequence
  chemically synthesized
caccatgttggtcaggctggtc

SEQ ID NO: 71730 - DNA, 22 bp, Artificial Sequence
  chemically synthesized
accatgttggtcaggctggtct

SEQ ID NO: 71731 - DNA, 22 bp, Artificial Sequence
  chemically synthesized
gtcaggctggtctcgaactcct

SEQ ID NO: 71732 - DNA, 22 bp, Artificial Sequence
  chemically synthesized
gtctcgaactcctgacctcatg

SEQ ID NO: 71733 - DNA, 22 bp, Artificial Sequence
  chemically synthesized
gaactcctgacctcatgagcca

SEQ ID NO: 71734 - DNA, 22 bp, Artificial Sequence
  chemically synthesized
ctgacctcatgagccacctgcc

SEQ ID NO: 71735 - DNA, 22 bp, Artificial Sequence
  chemically synthesized
acctcatgagccacctgcctcg

SEQ ID NO: 71736 - DNA, 22 bp, Artificial Sequence
  chemically synthesized
atgagccacctgcctcggcctc

SEQ ID NO: 71737 - DNA, 22 bp, Artificial Sequence
  chemically synthesized
cctcggcctcccaaagtgctgg

SEQ ID NO: 71738 - DNA, 22 bp, Artificial Sequence
  chemically synthesized
ggcctcccaaagtgctgggatt

SEQ ID NO: 71739 - DNA, 22 bp, Artificial Sequence
  chemically synthesized
ccaaagtgctgggattacaggt

SEQ ID NO: 71740 - DNA, 22 bp, Artificial Sequence
  chemically synthesized
ggattacaggtgtaagccaccg

SEQ ID NO: 71741 - DNA, 22 bp, Artificial Sequence
  chemically synthesized
caggtgtaagccaccgcgcccg

SEQ ID NO: 71742 - DNA, 22 bp, Artificial Sequence
  chemically synthesized
ttacactgtataaaaaaggtct

SEQ ID NO: 71743 - DNA, 22 bp, Artificial Sequence
  chemically synthesized
cactgtataaaaaaggtctgtt

SEQ ID NO: 71744 - DNA, 22 bp, Artificial Sequence
  chemically synthesized
tataaaaaaggtctgttagaat

SEQ ID NO: 71745 - DNA, 22 bp, Artificial Sequence
  chemically synthesized
ttagaattggggtccatgatgg

SEQ ID NO: 71746 - DNA, 22 bp, Artificial Sequence
  chemically synthesized
gaattggggtccatgatgggag

SEQ ID NO: 71747 - DNA, 22 bp, Artificial Sequence
  chemically synthesized
gggtccatgatgggagagaaag

SEQ ID NO: 71748 - DNA, 22 bp, Artificial Sequence
  chemically synthesized
aaagcccctgcagcacccagca

SEQ ID NO: 71749 - DNA, 22 bp, Artificial Sequence
  chemically synthesized
cagcacccagcatccagcatgt

SEQ ID NO: 71750 - DNA, 22 bp, Artificial Sequence
  chemically synthesized
aatatcagcctgtttgagaaat

SEQ ID NO: 71751 - DNA, 22 bp, Artificial Sequence
  chemically synthesized
tttgagaaataattgtttcaaa

SEQ ID NO: 71752 - DNA, 22 bp, Artificial Sequence
  chemically synthesized
gagaaataattgtttcaaaaac

SEQ ID NO: 71753 - DNA, 22 bp, Artificial Sequence
  chemically synthesized
agaaataattgtttcaaaaacc

SEQ ID NO: 71754 - DNA, 22 bp, Artificial Sequence
  chemically synthesized
tttcaaaaaccagtgatcattt

SEQ ID NO: 71755 - DNA, 22 bp, Artificial Sequence
  chemically synthesized
caaaaaccagtgatcatttaaa

SEQ ID NO: 71756 - DNA, 22 bp, Artificial Sequence
  chemically synthesized
aaaaaccagtgatcatttaaag

SEQ ID NO: 71757 - DNA, 22 bp, Artificial Sequence
  chemically synthesized
aaagaaaactcttaggcaagga

SEQ ID NO: 71758 - DNA, 22 bp, Artificial Sequence
  chemically synthesized
aagaaaactcttaggcaaggag

SEQ ID NO: 71759 - DNA, 22 bp, Artificial Sequence
  chemically synthesized
ttaggcaaggagtgcaatcttg

SEQ ID NO: 71760 - DNA, 22 bp, Artificial Sequence
  chemically synthesized
aggcaaggagtgcaatcttgga

SEQ ID NO: 71761 - DNA, 22 bp, Artificial Sequence
  chemically synthesized
ggcaaggagtgcaatcttggaa

SEQ ID NO: 71762 - DNA, 22 bp, Artificial Sequence
  chemically synthesized
ggaatctgctgaggtctaactg

SEQ ID NO: 71763 - DNA, 22 bp, Artificial Sequence
  chemically synthesized
gaatctgctgaggtctaactga

SEQ ID NO: 71764 - DNA, 22 bp, Artificial Sequence
  chemically synthesized
ctgaggtctaactgagtgcccc

SEQ ID NO: 71765 - DNA, 22 bp, Artificial Sequence
  chemically synthesized
aggtctaactgagtgccccaaa

SEQ ID NO: 71766 - DNA, 22 bp, Artificial Sequence
  chemically synthesized
actgagtgccccaaaccttggc

SEQ ID NO: 71767 - DNA, 22 bp, Artificial Sequence
  chemically synthesized
agtgccccaaaccttggcagca

SEQ ID NO: 71768 - DNA, 22 bp, Artificial Sequence
  chemically synthesized
ggcagcatattttctgggcact

SEQ ID NO: 71769 - DNA, 22 bp, Artificial Sequence
  chemically synthesized
gcagcatattttctgggcactt

SEQ ID NO: 71770 - DNA, 22 bp, Artificial Sequence
  chemically synthesized
tctgggcacttttgcttggagt

SEQ ID NO: 71771 - DNA, 22 bp, Artificial Sequence
  chemically synthesized
ctgggcacttttgcttggagtt

SEQ ID NO: 71772 - DNA, 22 bp, Artificial Sequence
  chemically synthesized
tgggcacttttgcttggagttt

SEQ ID NO: 71773 - DNA, 22 bp, Artificial Sequence
  chemically synthesized
ggcacttttgcttggagtttcc

SEQ ID NO: 71774 - DNA, 22 bp, Artificial Sequence
  chemically synthesized
ttgcttggagtttccaagagca

SEQ ID NO: 71775 - DNA, 22 bp, Artificial Sequence
  chemically synthesized
tgcttggagtttccaagagcat

SEQ ID NO: 71776 - DNA, 22 bp, Artificial Sequence
  chemically synthesized
gcttggagtttccaagagcatt

SEQ ID NO: 71777 - DNA, 22 bp, Artificial Sequence
  chemically synthesized
cttggagtttccaagagcattc

SEQ ID NO: 71778 - DNA, 22 bp, Artificial Sequence
  chemically synthesized
ggagtttccaagagcattcaga

SEQ ID NO: 71779 - DNA, 22 bp, Artificial Sequence
  chemically synthesized
gagtttccaagagcattcagat

SEQ ID NO: 71780 - DNA, 22 bp, Artificial Sequence
  chemically synthesized
ccaagagcattcagattaaaac

SEQ ID NO: 71781 - DNA, 22 bp, Artificial Sequence
  chemically synthesized
caagagcattcagattaaaacc

SEQ ID NO: 71782 - DNA, 22 bp, Artificial Sequence
  chemically synthesized
agattaaaaccaagcccttcaa

SEQ ID NO: 71783 - DNA, 22 bp, Artificial Sequence
  chemically synthesized
aaaccaagcccttcaagtggtc

SEQ ID NO: 71784 - DNA, 22 bp, Artificial Sequence
  chemically synthesized
caagtggtcaggaatatctttc

SEQ ID NO: 71785 - DNA, 22 bp, Artificial Sequence
  chemically synthesized
aagtggtcaggaatatctttca

SEQ ID NO: 71786 - DNA, 22 bp, Artificial Sequence
  chemically synthesized
tcaggttttgtatgcgttgaca

SEQ ID NO: 71787 - DNA, 22 bp, Artificial Sequence
  chemically synthesized
caggttttgtatgcgttgacat

SEQ ID NO: 71788 - DNA, 22 bp, Artificial Sequence
  chemically synthesized
aggttttgtatgcgttgacatg

SEQ ID NO: 71789 - DNA, 22 bp, Artificial Sequence
  chemically synthesized
tgtatgcgttgacatgattttt

SEQ ID NO: 71790 - DNA, 22 bp, Artificial Sequence
  chemically synthesized
gtatgcgttgacatgatttttt

SEQ ID NO: 71791 - DNA, 22 bp, Artificial Sequence
  chemically synthesized
tatgcgttgacatgattttttt

SEQ ID NO: 71792 - DNA, 22 bp, Artificial Sequence
  chemically synthesized
acatgatttttttttttttttg

SEQ ID NO: 71793 - DNA, 22 bp, Artificial Sequence
  chemically synthesized
ttttttttttttgatagtgagg

SEQ ID NO: 71794 - DNA, 22 bp, Artificial Sequence
  chemically synthesized
tttttttttttgatagtgaggt

SEQ ID NO: 71795 - DNA, 22 bp, Artificial Sequence
  chemically synthesized
ttttttttttgatagtgaggtt

SEQ ID NO: 71796 - DNA, 22 bp, Artificial Sequence
  chemically synthesized
tttttttttgatagtgaggtta

SEQ ID NO: 71797 - DNA, 22 bp, Artificial Sequence
  chemically synthesized
ttttttttgatagtgaggttaa

SEQ ID NO: 71798 - DNA, 22 bp, Artificial Sequence
  chemically synthesized
tttttttgatagtgaggttaac

SEQ ID NO: 71799 - DNA, 22 bp, Artificial Sequence
  chemically synthesized
ttttttgatagtgaggttaaca

SEQ ID NO: 71800 - DNA, 22 bp, Artificial Sequence
  chemically synthesized
tttttgatagtgaggttaacat

SEQ ID NO: 71801 - DNA, 22 bp, Artificial Sequence
  chemically synthesized
ttttgatagtgaggttaacatt

SEQ ID NO: 71802 - DNA, 22 bp, Artificial Sequence
  chemically synthesized
tttgatagtgaggttaacattg

SEQ ID NO: 71803 - DNA, 22 bp, Artificial Sequence
  chemically synthesized
ttgatagtgaggttaacattga

SEQ ID NO: 71804 - DNA, 22 bp, Artificial Sequence
  chemically synthesized
tgatagtgaggttaacattgac

SEQ ID NO: 71805 - DNA, 22 bp, Artificial Sequence
  chemically synthesized
gatagtgaggttaacattgacg

SEQ ID NO: 71806 - DNA, 22 bp, Artificial Sequence
  chemically synthesized
atagtgaggttaacattgacga

SEQ ID NO: 71807 - DNA, 22 bp, Artificial Sequence
  chemically synthesized
acattgacgaagatggctatat

SEQ ID NO: 71808 - DNA, 22 bp, Artificial Sequence
  chemically synthesized
acgaagatggctatatttattc

SEQ ID NO: 71809 - DNA, 22 bp, Artificial Sequence
  chemically synthesized
tatttattcctatttttaaaaa

SEQ ID NO: 71810 - DNA, 22 bp, Artificial Sequence
  chemically synthesized
attcctatttttaaaaattctt

SEQ ID NO: 71811 - DNA, 22 bp, Artificial Sequence
  chemically synthesized
ttcctatttttaaaaattctta

SEQ ID NO: 71812 - DNA, 22 bp, Artificial Sequence
  chemically synthesized
ctatttttaaaaattcttattt

SEQ ID NO: 71813 - DNA, 22 bp, Artificial Sequence
  chemically synthesized
tttttaaaaattcttattttat

SEQ ID NO: 71814 - DNA, 22 bp, Artificial Sequence
  chemically synthesized
ttaaaaattcttattttataat

SEQ ID NO: 71815 - DNA, 22 bp, Artificial Sequence
  chemically synthesized
taaaaattcttattttataatt

SEQ ID NO: 71816 - DNA, 22 bp, Artificial Sequence
  chemically synthesized
aaaaattcttattttataattc

SEQ ID NO: 71817 - DNA, 22 bp, Artificial Sequence
  chemically synthesized
aaaattcttattttataattct

SEQ ID NO: 71818 - DNA, 22 bp, Artificial Sequence
  chemically synthesized
ttattttataattcttatttta

SEQ ID NO: 71819 - DNA, 22 bp, Artificial Sequence
  chemically synthesized
attttataattcttattttata

SEQ ID NO: 71820 - DNA, 22 bp, Artificial Sequence
  chemically synthesized
ttttataattcttattttataa

SEQ ID NO: 71821 - DNA, 22 bp, Artificial Sequence
  chemically synthesized
tataattcttattttataaatc

SEQ ID NO: 71822 - DNA, 22 bp, Artificial Sequence
  chemically synthesized
ataattcttattttataaatca

SEQ ID NO: 71823 - DNA, 22 bp, Artificial Sequence
  chemically synthesized
taattcttattttataaatcag

SEQ ID NO: 71824 - DNA, 22 bp, Artificial Sequence
  chemically synthesized
ttattttataaatcagtgtccc

SEQ ID NO: 71825 - DNA, 22 bp, Artificial Sequence
  chemically synthesized
attttataaatcagtgtccccg

SEQ ID NO: 71826 - DNA, 22 bp, Artificial Sequence
  chemically synthesized
ttttataaatcagtgtccccgg

SEQ ID NO: 71827 - DNA, 22 bp, Artificial Sequence
  chemically synthesized
tataaatcagtgtccccggaag

SEQ ID NO: 71828 - DNA, 22 bp, Artificial Sequence
  chemically synthesized
ataaatcagtgtccccggaagt

SEQ ID NO: 71829 - DNA, 22 bp, Artificial Sequence
  chemically synthesized
taaatcagtgtccccggaagta

SEQ ID NO: 71830 - DNA, 22 bp, Artificial Sequence
  chemically synthesized
gaatggaagtattttgtaggct

SEQ ID NO: 71831 - DNA, 22 bp, Artificial Sequence
  chemically synthesized
tgtaggctgttggttctgttct

SEQ ID NO: 71832 - DNA, 22 bp, Artificial Sequence
  chemically synthesized
gtaggctgttggttctgttctt

SEQ ID NO: 71833 - DNA, 22 bp, Artificial Sequence
  chemically synthesized
taggctgttggttctgttctta

SEQ ID NO: 71834 - DNA, 22 bp, Artificial Sequence
  chemically synthesized
ttggttctgttcttacagtatg

SEQ ID NO: 71835 - DNA, 22 bp, Artificial Sequence
  chemically synthesized
gttctgttcttacagtatgcca

SEQ ID NO: 71836 - DNA, 22 bp, Artificial Sequence
  chemically synthesized
tgttcttacagtatgccacata

SEQ ID NO: 71837 - DNA, 22 bp, Artificial Sequence
  chemically synthesized
ttcttacagtatgccacatagc

SEQ ID NO: 71838 - DNA, 22 bp, Artificial Sequence
  chemically synthesized
ttacagtatgccacatagcttt

SEQ ID NO: 71839 - DNA, 22 bp, Artificial Sequence
  chemically synthesized
acagtatgccacatagctttga

SEQ ID NO: 71840 - DNA, 22 bp, Artificial Sequence
  chemically synthesized
cagtatgccacatagctttgac

SEQ ID NO: 71841 - DNA, 22 bp, Artificial Sequence
  chemically synthesized
tgactccttttggagtatagtg

SEQ ID NO: 71842 - DNA, 22 bp, Artificial Sequence
  chemically synthesized
gactccttttggagtatagtgt

SEQ ID NO: 71843 - DNA, 22 bp, Artificial Sequence
  chemically synthesized
actccttttggagtatagtgtg

SEQ ID NO: 71844 - DNA, 22 bp, Artificial Sequence
  chemically synthesized
cttttggagtatagtgtgaagg

SEQ ID NO: 71845 - DNA, 22 bp, Artificial Sequence
  chemically synthesized
ttggagtatagtgtgaaggaag

SEQ ID NO: 71846 - DNA, 22 bp, Artificial Sequence
  chemically synthesized
tggagtatagtgtgaaggaagc

SEQ ID NO: 71847 - DNA, 22 bp, Artificial Sequence
  chemically synthesized
ggagtatagtgtgaaggaagca

SEQ ID NO: 71848 - DNA, 22 bp, Artificial Sequence
  chemically synthesized
gagtatagtgtgaaggaagcag

SEQ ID NO: 71849 - DNA, 22 bp, Artificial Sequence
  chemically synthesized
gaggaattttgagtctggtgga

SEQ ID NO: 71850 - DNA, 22 bp, Artificial Sequence
  chemically synthesized
aggaattttgagtctggtggaa

SEQ ID NO: 71851 - DNA, 22 bp, Artificial Sequence
  chemically synthesized
tgagtctggtggaagttccaaa

SEQ ID NO: 71852 - DNA, 22 bp, Artificial Sequence
  chemically synthesized
gagtctggtggaagttccaaaa

SEQ ID NO: 71853 - DNA, 22 bp, Artificial Sequence
  chemically synthesized
agtctggtggaagttccaaaat

SEQ ID NO: 71854 - DNA, 22 bp, Artificial Sequence
  chemically synthesized
gtggaagttccaaaataactgg

SEQ ID NO: 71855 - DNA, 22 bp, Artificial Sequence
  chemically synthesized
caaaataactggtgatgcaagc

SEQ ID NO: 71856 - DNA, 22 bp, Artificial Sequence
  chemically synthesized
gtgatgcaagcacaccttcctt

SEQ ID NO: 71857 - DNA, 22 bp, Artificial Sequence
  chemically synthesized
ccttcttcaagagttcatcttg

SEQ ID NO: 71858 - DNA, 22 bp, Artificial Sequence
  chemically synthesized
cttcttcaagagttcatcttga

SEQ ID NO: 71859 - DNA, 22 bp, Artificial Sequence
  chemically synthesized
cttcaagagttcatcttgagtt

SEQ ID NO: 71860 - DNA, 22 bp, Artificial Sequence
  chemically synthesized
ttcaagagttcatcttgagttc

SEQ ID NO: 71861 - DNA, 22 bp, Artificial Sequence
  chemically synthesized
caagagttcatcttgagttcct

SEQ ID NO: 71862 - DNA, 22 bp, Artificial Sequence
  chemically synthesized
aagagttcatcttgagttccta

SEQ ID NO: 71863 - DNA, 22 bp, Artificial Sequence
  chemically synthesized
atcttgagttcctaaccagcag

SEQ ID NO: 71864 - DNA, 22 bp, Artificial Sequence
  chemically synthesized
gagttcctaaccagcagagaaa

SEQ ID NO: 71865 - DNA, 22 bp, Artificial Sequence
  chemically synthesized
agttcctaaccagcagagaaac

SEQ ID NO: 71866 - DNA, 22 bp, Artificial Sequence
  chemically synthesized
ctaaccagcagagaaacaatat

SEQ ID NO: 71867 - DNA, 22 bp, Artificial Sequence
  chemically synthesized
accagcagagaaacaatattat

SEQ ID NO: 71868 - DNA, 22 bp, Artificial Sequence
  chemically synthesized
tatttctttcctctgactgcct

SEQ ID NO: 71869 - DNA, 22 bp, Artificial Sequence
  chemically synthesized
ctttcctctgactgcctaggag

SEQ ID NO: 71870 - DNA, 22 bp, Artificial Sequence
  chemically synthesized
tttcctctgactgcctaggaga

SEQ ID NO: 71871 - DNA, 22 bp, Artificial Sequence
  chemically synthesized
tcctctgactgcctaggagaga

SEQ ID NO: 71872 - DNA, 22 bp, Artificial Sequence
  chemically synthesized
cctctgactgcctaggagagac

SEQ ID NO: 71873 - DNA, 22 bp, Artificial Sequence
  chemically synthesized
ctctgactgcctaggagagaca

SEQ ID NO: 71874 - DNA, 22 bp, Artificial Sequence
  chemically synthesized
tgactgcctaggagagacagta

SEQ ID NO: 71875 - DNA, 22 bp, Artificial Sequence
  chemically synthesized
actgcctaggagagacagtact

SEQ ID NO: 71876 - DNA, 22 bp, Artificial Sequence
  chemically synthesized
cctaggagagacagtactcttc

SEQ ID NO: 71877 - DNA, 22 bp, Artificial Sequence
  chemically synthesized
ggagagacagtactcttcagtt

SEQ ID NO: 71878 - DNA, 22 bp, Artificial Sequence
  chemically synthesized
ttcagtttgcattcccctggag

SEQ ID NO: 71879 - DNA, 22 bp, Artificial Sequence
  chemically synthesized
cagtttgcattcccctggagtt

SEQ ID NO: 71880 - DNA, 22 bp, Artificial Sequence
  chemically synthesized
agtttgcattcccctggagtta

SEQ ID NO: 71881 - DNA, 22 bp, Artificial Sequence
  chemically synthesized
gcattcccctggagttacatta

SEQ ID NO: 71882 - DNA, 22 bp, Artificial Sequence
  chemically synthesized
cattcccctggagttacattaa

SEQ ID NO: 71883 - DNA, 22 bp, Artificial Sequence
  chemically synthesized
ccctggagttacattaagtcat

SEQ ID NO: 71884 - DNA, 22 bp, Artificial Sequence
  chemically synthesized
gagttacattaagtcatggaac

SEQ ID NO: 71885 - DNA, 22 bp, Artificial Sequence
  chemically synthesized
cattaagtcatggaacttctca

SEQ ID NO: 71886 - DNA, 22 bp, Artificial Sequence
  chemically synthesized
agtcatggaacttctcacttcc

SEQ ID NO: 71887 - DNA, 22 bp, Artificial Sequence
  chemically synthesized
ctcacttccagtaaaatccaga

SEQ ID NO: 71888 - DNA, 22 bp, Artificial Sequence
  chemically synthesized
tcacttccagtaaaatccagaa

SEQ ID NO: 71889 - DNA, 22 bp, Artificial Sequence
  chemically synthesized
acttccagtaaaatccagaagc

SEQ ID NO: 71890 - DNA, 22 bp, Artificial Sequence
  chemically synthesized
ccagtaaaatccagaagcagtc

SEQ ID NO: 71891 - DNA, 22 bp, Artificial Sequence
  chemically synthesized
cagtaaaatccagaagcagtca

SEQ ID NO: 71892 - DNA, 22 bp, Artificial Sequence
  chemically synthesized
tctgtttttctatcttagttta

SEQ ID NO: 71893 - DNA, 22 bp, Artificial Sequence
  chemically synthesized
tttttctatcttagtttaaatt

SEQ ID NO: 71894 - DNA, 22 bp, Artificial Sequence
  chemically synthesized
ttctatcttagtttaaattagg

SEQ ID NO: 71895 - DNA, 22 bp, Artificial Sequence
  chemically synthesized
tctatcttagtttaaattagga

SEQ ID NO: 71896 - DNA, 22 bp, Artificial Sequence
  chemically synthesized
ctatcttagtttaaattaggat

SEQ ID NO: 71897 - DNA, 22 bp, Artificial Sequence
  chemically synthesized
tatcttagtttaaattaggata

SEQ ID NO: 71898 - DNA, 22 bp, Artificial Sequence
  chemically synthesized
tcttagtttaaattaggatatc

SEQ ID NO: 71899 - DNA, 22 bp, Artificial Sequence
  chemically synthesized
agtttaaattaggatatcttat

SEQ ID NO: 71900 - DNA, 22 bp, Artificial Sequence
  chemically synthesized
gtttaaattaggatatcttatt

SEQ ID NO: 71901 - DNA, 22 bp, Artificial Sequence
  chemically synthesized
aaattaggatatcttattacga

SEQ ID NO: 71902 - DNA, 22 bp, Artificial Sequence
  chemically synthesized
aattaggatatcttattacgaa

SEQ ID NO: 71903 - DNA, 22 bp, Artificial Sequence
  chemically synthesized
ggatatcttattacgaaccaca

SEQ ID NO: 71904 - DNA, 22 bp, Artificial Sequence
  chemically synthesized
attacgaaccacatggcctttc

SEQ ID NO: 71905 - DNA, 22 bp, Artificial Sequence
  chemically synthesized
ttacgaaccacatggcctttct

SEQ ID NO: 71906 - DNA, 22 bp, Artificial Sequence
  chemically synthesized
cgaaccacatggcctttctttt

SEQ ID NO: 71907 - DNA, 22 bp, Artificial Sequence
  chemically synthesized
tctttttgctttgtattttaaa

SEQ ID NO: 71908 - DNA, 22 bp, Artificial Sequence
  chemically synthesized
ctttttgctttgtattttaaaa

SEQ ID NO: 71909 - DNA, 22 bp, Artificial Sequence
  chemically synthesized
tttttgctttgtattttaaaaa

SEQ ID NO: 71910 - DNA, 22 bp, Artificial Sequence
  chemically synthesized
tttgctttgtattttaaaaaat

SEQ ID NO: 71911 - DNA, 22 bp, Artificial Sequence
  chemically synthesized
ttgctttgtattttaaaaaatg

SEQ ID NO: 71912 - DNA, 22 bp, Artificial Sequence
  chemically synthesized
tgctttgtattttaaaaaatgc

SEQ ID NO: 71913 - DNA, 22 bp, Artificial Sequence
  chemically synthesized
gctttgtattttaaaaaatgct

SEQ ID NO: 71914 - DNA, 22 bp, Artificial Sequence
  chemically synthesized
ctttgtattttaaaaaatgctc

SEQ ID NO: 71915 - DNA, 22 bp, Artificial Sequence
  chemically synthesized
tgtattttaaaaaatgctccca

SEQ ID NO: 71916 - DNA, 22 bp, Artificial Sequence
  chemically synthesized
gtattttaaaaaatgctcccag

SEQ ID NO: 71917 - DNA, 22 bp, Artificial Sequence
  chemically synthesized
tattttaaaaaatgctcccagg

SEQ ID NO: 71918 - DNA, 22 bp, Artificial Sequence
  chemically synthesized
taaaaaatgctcccaggaagta

SEQ ID NO: 71919 - DNA, 22 bp, Artificial Sequence
  chemically synthesized
aaaaaatgctcccaggaagtac

SEQ ID NO: 71920 - DNA, 22 bp, Artificial Sequence
  chemically synthesized
aaaaatgctcccaggaagtact

SEQ ID NO: 71921 - DNA, 22 bp, Artificial Sequence
  chemically synthesized
ccaggaagtacttaagctttat

SEQ ID NO: 71922 - DNA, 22 bp, Artificial Sequence
  chemically synthesized
aagctttatagaatacttttat

SEQ ID NO: 71923 - DNA, 22 bp, Artificial Sequence
  chemically synthesized
agctttatagaatacttttata

SEQ ID NO: 71924 - DNA, 22 bp, Artificial Sequence
  chemically synthesized
tatagaatacttttatatacat

SEQ ID NO: 71925 - DNA, 22 bp, Artificial Sequence
  chemically synthesized
atagaatacttttatatacatg

SEQ ID NO: 71926 - DNA, 22 bp, Artificial Sequence
  chemically synthesized
tagaatacttttatatacatga

SEQ ID NO: 71927 - DNA, 22 bp, Artificial Sequence
  chemically synthesized
ttatatacatgatagaatcaat

SEQ ID NO: 71928 - DNA, 22 bp, Artificial Sequence
  chemically synthesized
tatatacatgatagaatcaatt

SEQ ID NO: 71929 - DNA, 22 bp, Artificial Sequence
  chemically synthesized
atatacatgatagaatcaattt

SEQ ID NO: 71930 - DNA, 22 bp, Artificial Sequence
  chemically synthesized
tatacatgatagaatcaatttt

SEQ ID NO: 71931 - DNA, 22 bp, Artificial Sequence
  chemically synthesized
tccttgtgattctataaattag

SEQ ID NO: 71932 - DNA, 22 bp, Artificial Sequence
  chemically synthesized
ccttgtgattctataaattaga

SEQ ID NO: 71933 - DNA, 22 bp, Artificial Sequence
  chemically synthesized
cttgtgattctataaattagat

SEQ ID NO: 71934 - DNA, 22 bp, Artificial Sequence
  chemically synthesized
gtgattctataaattagataag

SEQ ID NO: 71935 - DNA, 22 bp, Artificial Sequence
  chemically synthesized
tgattctataaattagataaga

SEQ ID NO: 71936 - DNA, 22 bp, Artificial Sequence
  chemically synthesized
tataaattagataagaaaagaa

SEQ ID NO: 71937 - DNA, 22 bp, Artificial Sequence
  chemically synthesized
taaattagataagaaaagaata

SEQ ID NO: 71938 - DNA, 22 bp, Artificial Sequence
  chemically synthesized
gataagaaaagaatagactgaa

SEQ ID NO: 71939 - DNA, 22 bp, Artificial Sequence
  chemically synthesized
aagttgaaaggaatcctagtaa

SEQ ID NO: 71940 - DNA, 22 bp, Artificial Sequence
  chemically synthesized
aaaggaatcctagtaatcactc

SEQ ID NO: 71941 - DNA, 22 bp, Artificial Sequence
  chemically synthesized
gtaatcactcattttagagatc

SEQ ID NO: 71942 - DNA, 22 bp, Artificial Sequence
  chemically synthesized
attttagagatcagaataataa

SEQ ID NO: 71943 - DNA, 22 bp, Artificial Sequence
  chemically synthesized
tagagatcagaataataagggc

SEQ ID NO: 71944 - DNA, 22 bp, Artificial Sequence
  chemically synthesized
agagatcagaataataagggcc

SEQ ID NO: 71945 - DNA, 22 bp, Artificial Sequence
  chemically synthesized
gagatcagaataataagggccc

SEQ ID NO: 71946 - DNA, 22 bp, Artificial Sequence
  chemically synthesized
agtgaagtacctaagatcacag

SEQ ID NO: 71947 - DNA, 22 bp, Artificial Sequence
  chemically synthesized
agatcacagtgtgaaaaaaaca

SEQ ID NO: 71948 - DNA, 23 bp, Artificial Sequence
  Description of Artificial Sequence: Synthetic oligonucleotide
  misc_feature (1)..(21): n is a, c, g, or t
nnnnnnnnnnnnnnnnnnnnnrg

SEQ ID NO: 71949 - protein, 9 aa, Unknown
  Description of Unknown: Homing endonuclease sequence
LAGLIDADG

SEQ ID NO: 71950 - RNA, 100 nt, Artificial Sequence
  Artificial Sequence: Synthetic Oligonucleotide
  modified_base (1)..(3): 2'-O-methyl phosphorothioate nucleotides
  modified_base (97)..(99): 2'-O-methyl phosphorothioate nucleotides
ugugugcuggcccgcaacuuguuuuagagcuagaaauagcaaguuaaaauaaggcuaguccguuaucaacuugaaaaaguggcaccgagucggugcuuuu

SEQ ID NO: 71951 - RNA, 100 nt, Artificial Sequence
  Artificial Sequence: Synthetic Oligonucleotide
  modified_base (1)..(3): 2'-O-methyl phosphorothioate nucleotides
  modified_base (97)..(99): 2'-O-methyl phosphorothioate nucleotides
cccacucaagagauauggugguuuuagagcuagaaauagcaaguuaaaauaaggcuaguccguuaucaacuugaaaaaguggcaccgagucggugcuuuu

SEQ ID NO: 71952 - RNA, 100 nt, Artificial Sequence
  Artificial Sequence: Synthetic Oligonucleotide
  modified_base (1)..(3): 2'-O-methyl phosphorothioate nucleotides
  modified_base (97)..(99): 2'-O-methyl phosphorothioate nucleotides
guagaccaccaguaaucugaguuuuagagcuagaaauagcaaguuaaaauaaggcuaguccguuaucaacuugaaaaaguggcaccgagucggugcuuuu

SEQ ID NO: 71953 - RNA, 100 nt, Artificial Sequence
  Artificial Sequence: Synthetic Oligonucleotide
  modified_base (1)..(3): 2'-O-methyl phosphorothioate nucleotides
  modified_base (97)..(99): 2'-O-methyl phosphorothioate nucleotides
aguauaccucccauaccaugguuuuagagcuagaaauagcaaguuaaaauaaggcuaguccguuaucaacuugaaaaaguggcaccgagucggugcuuuu

SEQ ID NO: 71954 - RNA, 100 nt, Artificial Sequence
  Artificial Sequence: Synthetic Oligonucleotide
  modified_base (1)..(3): 2'-O-methyl phosphorothioate nucleotides
  modified_base (97)..(99): 2'-O-methyl phosphorothioate nucleotides
cugucuuauuacccugucauguuuuagagcuagaaauagcaaguuaaaauaaggcuaguccguuaucaacuugaaaaaguggcaccgagucggugcuuuu

SEQ ID NO: 71955 - RNA, 100 nt, Artificial Sequence
  Artificial Sequence: Synthetic Oligonucleotide
  modified_base (1)..(3): 2'-O-methyl phosphorothioate nucleotides
  modified_base (97)..(99): 2'-O-methyl phosphorothioate nucleotides
acugaguucuaaaaucaucgguuuuagagcuagaaauagcaaguuaaaauaaggcuaguccguuaucaacuugaaaaaguggcaccgagucggugcuuuu

SEQ ID NO: 71956 - RNA, 100 nt, Artificial Sequence
  Artificial Sequence: Synthetic Oligonucleotide
  modified_base (1)..(3): 2'-O-methyl phosphorothioate nucleotides
  modified_base (97)..(99): 2'-O-methyl phosphorothioate nucleotides
gucuucagccuacaacauacguuuuagagcuagaaauagcaaguuaaaauaaggcuaguccguuaucaacuugaaaaaguggcaccgagucggugcuuuu

SEQ ID NO: 71957 - RNA, 100 nt, Artificial Sequence
  Artificial Sequence: Synthetic Oligonucleotide
  modified_base (1)..(3): 2'-O-methyl phosphorothioate nucleotides
  modified_base (97)..(99): 2'-O-methyl phosphorothioate nucleotides
guuaaguucaugucauaggaguuuuagagcuagaaauagcaaguuaaaauaaggcuaguccguuaucaacuugaaaaaguggcaccgagucggugcuuuu

SEQ ID NO: 71958 - RNA, 100 nt, Artificial Sequence
  Artificial Sequence: Synthetic Oligonucleotide
  modified_base (1)..(3): 2'-O-methyl phosphorothioate nucleotides
  modified_base (97)..(99): 2'-O-methyl phosphorothioate nucleotides
cuugucaaggcuauuggucaguuuuagagcuagaaauagcaaguuaaaauaaggcuaguccguuaucaacuugaaaaaguggcaccgagucggugcuuuu

SEQ ID NO: 71959 - RNA, 100 nt, Artificial Sequence Sequence
  Artificial Sequence: Synthetic Oligonucleotide
  modified_base (1)..(3): 2'-O-methyl phosphorothioate nucleotides
  modified_base (97)..(99): 2'-O-methyl phosphorothioate nucleotides
cuaacaguugcuuuuaucacguuuuagagcuagaaauagcaaguuaaaauaaggcuaguccguuaucaacuugaaaaaguggcaccgagucggugcuuuu

SEQ ID NO: 71960 - RNA, 100 nt, Artificial Sequence
  chemically synthesized
  modified_base (1)..(20): n is a, c, g, u, or other
nnnnnnnnnnnnnnnnnnnnguuuuagagcuagaaauagcaaguuaaaauaaggcuaguccguuaucaacuugaaaaaguggcaccgagucggugcuuuu

SEQ ID NO: 71961 - RNA, 96 nt, Artificial Sequence
  chemically synthesized
  modified_base (1)..(20): n is a, c, g, u, or other
nnnnnnnnnnnnnnnnnnnnguuuuagagcuagaaauagcaaguuaaaauaaggcuaguccguuaucaacuugaaaaaguggcaccgagucggugc

SEQ ID NO: 71962 - RNA, 114 nt, Artificial Sequence
  chemically synthesized
  modified_base (1)..(30): n is a, c, g, u, or other and this region may encompass 17-30 nucleotides;
  modified_base (107)..(114): This region may encompass 1-8 urasil;
nnnnnnnnnnnnnnnnnnnnnnnnnnnnnnguuuuagagcuagaaauagcaaguuaaaauaaggcuaguccguuaucaacuugaaaaaguggcaccgagucggugcuuuuuuuu
